(19) United States
(12) Patent Application Publication
(10) Pub. No.: US 2005/0064527 A1
(43) Pub. Date: Mar. 24, 2005

(54) NIMR compositions and their methods of use

(76) Inventors: Stuart B. Levy, Boston, MA (US); Teresa M. Barbosa, S. Pedro da Cova (PT); Michael N. Alekshun, Wakefield, MA (US)

Correspondence Address: LAHIVE & COCKFIELD, LLP., 28 STATE STREET, BOSTON, MA, 02109, US

(21) Appl. No.: 10/893,671

(22) Filed: Jul. 15, 2004

Related U.S. Application Data
(63) Continuation of application No. 09/801,563, filed on Mar. 8, 2001, now abandoned.
(60) Provisional application No. 60/188,362, filed on Mar. 10, 2000.

(51) Int. Cl. G01N 33/554; G01N 33/569; C12Q 1/04

(52) U.S. Cl. 435/7.32; 435/34

(57) ABSTRACT

Newly identified mar regulated (NIMR) genes and polypeptides are described. In addition, screening assays to identify agents that modulate NIMR activity are provided.

### RELATED APPLICATION INFORMATION

[0001] This application claims priority to U.S. Ser. No. 60/188,362, filed Mar. 10, 2000. The entire contents of this application are hereby incorporated by reference.

### GOVERNMENT FUNDING

This work was funded, in part, by United States Public Health Service Grant number GM51661. The government may, therefore, have certain rights in this invention.

### BACKGROUND OF THE INVENTION

[0003] Multidrug resistance in microbes is generally attributed to the acquisition of multiple transposons and plasmids bearing genetic determinants for different mechanisms of resistance (Gold et al. 1996. N. Engl. J. Med. 335:1445). However, descriptions of intrinsic mechanisms that confer multidrug resistance have begun to emerge. The first of these was a chromosomally encoded multiple antibiotic resistance (mar) locus in Escherichia coli (George and Levy. 1983. J. Bacteriol. 155:531; George and Levy 1983. J. Bacteriol. 155:541).

[0004] The multiple antibiotic resistance (mar) locus is a chromosomally encoded locus that controls an adaptational response to antibiotics and other environmental hazards (Alekshun, M. N. and Levy, S. B. 1997. Antimicrob. Agents Chemother. 10: 2067-2075). The mar locus consists of two divergently positioned transcriptional units that flank a common promoter/operator region in E. coli and Salmonella typhimurium (Alekshun and Levy. 1997. Antimicrobial Agents and Chemother. 41: 2067) and Shigella flexneri (Barbosa and Levy. 1999. 99^{th} General Meeting of the American Society for Microbiology (Chicago, Ill.). Abstract A42, p. 9). One unit encodes MarC, a putative integral inner membrane polypeptide without any yet apparent function, but which appears to contribute to the Mar phenotype in some strains. The other unit-comprises the marRAB operon, encoding the Mar repressor (MarR), which binds marO and negatively regulates expression of marRAB (Cohen et al. 1994. J. Bacteriol. 175:1484; Martin and Rosner. 1995. Proc. Natl. Acad. Sci. USA 92:5456; Seoane and Levy. 1995. J. Bacteriol. 177:530), an activator (MarA), which activates expression of MarRAB and controls expression of other genes on the chromosome, i.e., the mar regulon (Cohen et al. 1994. J. Bacteriol. 175:1484; Gambino et. al. 1993. J. Bacteriol. 175:2888; Seoane and Levy. 1995. J. Bacteriol. 177:530), and a putative small polypeptide (MarB) of unknown function. MarA is a member of the XyIS/AraC family of transcriptional activators (Gallegos et al. 1993. Nucleic Acids Res. 21:807).

[0005] The prior art has identified the mar regulon as comprising acrAB, fumC, inaA, marA, marB, marR, ompF, ompX, sodA, tolC, and zwf. Given the role of the mar locus in controlling bacterial responses to environmental stress, identification of other genes that are regulated by MarA will be of great benefit in controlling microbes.

### SUMMARY

[0006] The present invention represents an important advance in controlling microbial adaptation to environmental stress signals by newly identifying genes which respond to high constitutive levels or to overexpression of marA and, thus, are important in mediating resistance to and survival in environmental stresses in microbial cells. Further, the instant invention identifies genes under the control of MarA as being important in regulating virulence in microbes. Accordingly, the instant invention provides novel targets (genes and polypeptides) for use in screening assays to identify compounds that modulate microbial adaptation to stress and/or virulence.

[0007] In one aspect, the invention provides a method for identifying compounds that modulate an NIMR polypeptide activity comprising:
[0008] contacting an NIMR polypeptide with a test compound under conditions which allow interaction of the compound with the polypeptide;
[0009] determining the ability of the test compound to modulate the activity of an NIMR polypeptide; and
[0010] selecting those compounds that modulate the activity of the NIMR polypeptide to thereby identify compounds that modulate NIMR polypeptide activity.

[0011] In one embodiment, the NIMR polypeptide is selected from the group consisting of: b0357, b0447, b0853, b1448, b2530, b2889, b2948, b3469, mdaB, yadG, yadH, ybjC, yfaE, yggJ, and yhbW.

[0012] In another embodiment, the NIMR polypeptide activity comprises promoting the ability of a microbe to resist an environmental challenge. In another embodiment, the NIMR polypeptide is selected from the group consisting of: aceG, ackA, aldA, cobU, fabB, fecA, galK, galT, gatA, gatC, glpD, gltA, gshB, guaB, hemB, map, mglB, mtr, ndh, nfnB, pflB, pgi, purA, ribD, rimK, rplE, srlA_{—}2, tnaA, tnaL, tpx, acnA, mdaA, ribA, andydeA.

[0013] In another embodiment, the NIMR polypeptide activity comprises promotion of microbial virulence. In oner embodiment, the NIMR polypeptide is selected from the group consisting of: aceG, ackA, aldA, cobU, fabB, fecA, galK, galT, gatA, gatC, glpD, gitA, gshB, guaB, hemB, map, mglB, mtr, ndh, nfnB, pflB, pgi, purA, ribD, rimK, rplE, srA_{—}2, tnaA, tnaL, tpx, acnA, mdaA, ribA, andydeA.

[0014] In one embodiment, the step of determining comprises measuring the efflux of the test compound or a marker compound from the cell.

[0015] In one embodiment, the step of determining comprises measuring the ability of the microbe to grow or remain viable in the presence of the environmental challenge.

[0016] In one embodiment, the NIMR polypeptide is present in a microbial cell.

[0017] In another embodiment, the NIMR polypeptide is heterologous to the cell in which it is present.

[0018] In another aspect, the invention pertains to a method for identifying compounds that modulate an NIMR polypeptide activity comprising:
[0019] contacting an NIMR polypeptide with a test compound under conditions which allow interaction of the compound with the polypeptide;
[0020] determining the ability of the test compound to modulate the expression of an NIMR polypeptide; and
[0021] selecting those compounds that modulate the expression of the NIMR polypeptide to thereby identify compounds that modulate NIMR polypeptide activity.

[0022] In one embodiment, the NIMR polypeptide is selected from the group consisting of: b0357, b0447, b0853, b1448, b2530, b2889, b2948, b3469, mdaB, yadG, yadH, ybjC, yfaE, yggJ, and yhbW.

[0023] In one embodiment, the NIMR polypeptide is selected from the group consisting of: aceG, ackA, aldA, cob U, fabB, fecA, galK, galT, gatA, gatC, glpD, gltA, gshB, guaB, hemB, map, mglB, mtr, ndh, nfnb, pflB, pgi, purA, ribD, rimK, rplE, srlA_{—}2, tnaA, tnaL, tpx, acnA, mdaA, ribA, and ydeA.

[0024] In one embodiment, the step of measuring comprises measuring the amount of RNA produced by the cell.

[0025] In one embodiment, the step of measuring comprises measuring the amount or activity of a reporter gene product produced by the cell. In another embodiment, the step of measuring comprises detecting the ability of an antibody to bind to the reporter gene product.

[0026] In one embodiment, the NIMR polypeptide is present in a cell free system.

[0027] In one embodiment, the step of determining comprises measuring the ability of the compound to bind to the NIMR polypeptide.

[0028] In one aspect, the invention pertains to a method for decreasing the virulence of a microbe comprising exposing the microbe to an environmental challenge and to an agent that modulates the activity of an NIMR polypeptide.

[0029] In another aspect, the invention pertains to a method for reducing the marA mediated transcription of an NIMR gene comprising exposing the microbe to an environmental challenge and to an agent that modulates the activity of an NIMR polypeptide.

[0030] In another aspect, the invention pertains to a method for identifying compounds that modulate activity of an NIMR polypeptide in a microbe comprising: contacting an isolated NIMR nucleic acid molecule with a test compound under conditions which allow interaction of the compound with the nucleic acid molecule; determining the ability of the test compound to bind to the isolated NIMR nucleic acid molecule; and selecting those compounds that bind to the NIMR nucleic acid molecule to thereby identify compounds that modulate activity of an NIMR polypeptide.

[0031] In one embodiment, the NIMR polypeptide is selected from the group consisting of: b0357, b0447, b0853, b1448, b2530, b2889, b2948, b3469, mdaB, yadG, yadH, ybjC, yfaE, yggJ and yhbW.

[0032] In one embodiment, the NIMR polypeptide activity comprises promoting the ability of a microbe to resist an environmental challenge.

[0033] In one embodiment, the NIMR polypeptide is selected from the group consisting of: aceG, ackA, aldA, cobU, fabB, fecA, galk, galT, gatA, gatC, glpD, gitA, gshB, guaB, hemB, map, mglB, mir, ndh, nfnB, pfiB, pgi, purA, ribD, rimK, rplE, srlA_{—}2, tnaA, tnaL, tpx, acna, mdaA, ribA, andydeA.

[0034] In another embodiment, the NIMR polypeptide activity comprises promotion of the virulence of a microbe.

[0035] In yet another embodiment, the NIMR polypeptide is selected from the group consisting of: aceG, ackA, alda, cobU, fabB, fecA, galK, galt gatA, gatC, glpD, gltA, gshB, guaB, hemB, map, mglB, mtr, ndh, nfnB, pflB, pgi, purA, ribD, rimK, rplE, srA_{—}2, tnaA, tnaL, tpx, acnA, mdaA, ribA, and ydeA.

[0036] In one embodiment, the environmental challenge is an antibiotic compound.

[0037] In another embodiment, the environmental challenge is non-antibiotic compound.

[0038] In yet another embodiment, the non-antibiotic compound is a candidate disinfectant or antiseptic compound.

[0039] In yet another aspect, the invention pertains to a vaccine comprising an NIMR nucleic acid molecule or an NIMR polypeptide and a pharmaceutically acceptable carrier.

[0040] In another aspect, the invention pertains to a composition comprising a compound that modulates the activity of an NIMR polypeptide and an antibiotic.

[0041] In still another aspect, the invention pertains ot a composition comprising a compound that modulates the activity of an NIMR polypeptide and a non-antibiotic compound.

[0042] In yet another aspect, the invention pertains to a method for reducing the virulence of a microbe in a subject suffering from a microbial infection comprising administering an NIMR modulating agent to the subject such that the virulence of the microbe is reduced.

[0043] In another aspect, the invention pertains to a method for treating a microbial infection in a subject comprising administering an NIMR modulating agent to the subject such that the infection is treated.

[0044] In another aspect, the invention pertains to a method for reducing the infectivity of a microbe on a surface comprising contacting the microbe with an NIMR modulating agent such that the infectivity of the microbe is reduced.

[0045] In one embodiment, the microbe is a gram positive bacterium. In another embodiment, the microbe is a gram negative bacterium. In still another embodiment, the microbe is an acid fast bacterium.

### BRIEF DESCRIPTION OF THE DRAWINGS

[0046] FIG. 1 illustrates a gene expression profile of the Escherichia coli MarA regulated genes.

[0047] FIG. 2 illustrates the chromosomal distribution and location of the different members of the mar regulon.

[0048] FIG. 3 illustrates northern blot analysis of NIMR genes.

### DETAILED DESCRIPTION

[0049] Although the mar regulon was previously identified as being involved in multidrug resistance, the instant invention demonstrates that many more genes of more varied function than previously taught or suggested in the art are under the control, either directly or indirectly, of marA. The present invention represents an important advance in controlling microbial adaptation to stress and/or virulence by newly identifying genes that respond to high constitutive expression or to the overexpression of marA, and referred to herein as “Newly Identified MarA Responsive (NIMR) genes.” The identification of these genes provides novel targets, both nucleic acid and polypeptide targets, for use in screening assays to identify compounds that modulate microbial responses to environmental stress and, thereby, modulate microbial adaptation to their environment and/or microbial virulence. Compounds identified in such screening assays can be used, e.g., to improve the activity of antibiotics, to improve the activity of non-antibiotic agents (e.g., disinfectants), and to prevent the MarA induced expression of NIMR genes.

[0050] Before further description of the invention, certain terms employed in the specification, examples and appended claims are, for convenience, collected here.

[0051] I. Definitions

[0052] As used herein the term “newly identified MarA responsive gene (NIMR gene)” includes genes newly identified as responding to high constitutive expression or the overexpression of MarA. Preferably, transcription of these genes is directly modulated by MarA, placing them in the mar regulon. As used herein, the term “regulon” includes two or more loci in two or more different operons whose expression is regulated by a common repressor or activator protein. The newly identified mar responsive genes are genes whose expression is controlled by MarA, but which had not, prior to the instant invention, been identified as being under the control of this transcriptional activator and had not been previously identified as part of the mar regulon. NIMR genes can be either positively or negatively regulated by MarA and can respond directly to MarA or can respond indirectly to MarA, e.g., in response to another protein (e.g., a transcriptional regulator) that directly responds to MarA.

[0053] NIMR genes do not include genes identified as being part of the “prior art mar regulon.” As used herein, the term “prior art mar regulon” includes: acrAB, fumc, inaA, marA, marB, marR, ompF, ompX, sodA, tolC, and zwf. Preferably, NMIR genes include genes that were not previously associated with stress responses in bacteria. For example, preferred, NIMR genes had not previously been identified as being part of the soxRS regulon (comprising the acna, acrAB, fumC, inaA, mdaA, ompF, ribA, sodA, and zwf genes). Particularly preferred NIMR genes had no known function prior to their placement in the mar regulon in the instant invention. Exemplary NIMR genes are listed in Table 1 below:

TABLE 1

| | |
|---|---|
| accB* (AE000404) | b0357*(AE000142) |
| aceE* (AE000120) | b0447 (AE000151) |
| aceF* (AE000120) | b0853 (AE000187) |
| ackA* (AE000318) | b1448 (AE000241) |
| aldA (AE000239) | b2530*(AE000339) |
| cobU (AE000291) | b2889 (AE000372) |
| fabB* (AE000231) | b2948 (AE000377) |
| fecA* (AE000499) | b3469*(AE000422) |
| galK (AE000178) | mdaB (AE000385) |
| galT (AE000178) | yadG (AE000122) |
| gatA (AE000298) | yadH (AE000122) |
| gatC (AE000298) | ybjC (AE000187) |
| glpD* (AE000418) | yfaE (AE000313) |
| gltA (AE000175) | yggJ (AE000377) |
| gshB (AE000377) | yhbW (AE000397) |
| guaB* (AE000337) | hemB (AE000143) |
| map (AE000126) | mglB (AE000304) |
| mtr (AE000397) | ndh* (AE000211) |
| nfnB (AE000163) | pflB (AE000192) |
| pgi (AE000476) | purA* (AE000195) |
| ribD (AE000148) | rimK (AE000187) |
| rplE* (AE000408) | srlA_2 (AE000354) |
| tnaA (AE000448) | tnaL (AE000448) |
| tpx (AE000230) | ydeA (AE000250) |
| acnA (AE000225) | mdaA (AE000187) |
| ribA (AE000226) | |

Accession numbers from the E. coli K-12 genome project (National Center for Biotechnology Entrez database (http://www.ncbi.nlm.nih.gov/)) are given in parentheses after each gene. The sequences for these exemplary NIMR genes are available on GenBank and are presented in the sequence listing part of the description.
*Indicates a gene that is down regulated by overexpression of MarA.

[0054] As used herein, the language “NIMR genes” also includes NIMR genes having nucleotide sequence similarity to the NIMR genes described above. For example, such genes may be derived from other organisms. For instance, the multiple antibiotic resistance (mar) locus, first described in the chromosome of Escherichia coli, is also present among other genera of enteric bacteria (Cohen, S. P., Yan, W. & Levy, S. B. (1993) J. Infect. Dis. 168, 484-488). Molecular characterization of this locus has been performed in E. coli (Cohen, S. P., Hachler, H. & Levy, S. B. (1993) J. Bacteriol. 175, 1484-1492), Salmonella typhimurium (Sulavick, M. C., Dazer, M. & Miller, P. F. (1997) J. Bacteriol. 179, 1857-1866) and more recently Shigella flexneri.

[0055] NIMR gene sequences are “structurally related” to one or more of the NIMR genes set forth in the Table above. This structural relatedness can be demonstrated by sequence similarity between two NIMR nucleotide sequences or between the amino acid sequences of two NIMR polypeptides. As used herein, the term “NIMR polypeptide” includes polypeptides specified by NIMR genes. NIMR polypeptides have an NIMR activity, e.g., modulate microbial adaptation to environmental stress and/or microbial virulence.

[0056] As used herein, the term “activity” with respect to an NIMR polypeptide includes the modulation of the ability of the microbe to adapt to environmental stress and/or modulation of virulence. In addition, NIMR polypeptides may have additional activities. A used herein, the term “environmental stress” or “environmental challenge” with reference to exposure of a microbe includes agents, which when contacted with a microbe, provoke a stress response in the microbe. Such agents may lead to a decrease in growth, viability, and/or virulence in individual susceptible microbial cells, but also serve as a stimulus for other microbial cells to adapt to the environmental signal e.g., by acting as a selection agent for microbes that have a mutation in a target molecule affected by the stress signal. Thus, in a microbe that is equipped to deal with the environmental stress (e.g., possesses a phenotype that allows growth in response to the changing environmental conditions brought about by the stress signal), the cell adapts, (e.g. retains its virulence and/or its ability to grow and remain viable when exposed to the environmental stress signal). “Environmental stress” or “environmental challenge” refers to agents that come into contact with a microbe or conditions to which a microbe is exposed that present a challenge to the survival of the microbe. Microbes can contact such environmental stress signals inside (including on the surface of) or outside a mammalian body. For example, microbes (e.g., pathogenic microbes) can be contacted with environmental challenges inside the body or microbes outside the body (e.g., pathogenic microbes or environmentally important microbes residing on surfaces) can be contacted with environmental challenges outside the body to create an environmental stress.

[0057] In one embodiment an environmental stress or challenge is brought about by human intervention, e.g., by exposure of the microbe to a drug as brought about by man (such as a non-antibiotic agent or an antibiotic). For example, such agents include antibiotics or non-antibiotic compounds.

[0058] In another embodiment, an environmental stress or challenge is the result of a natural process, e.g., the natural course of an infection, resulting e.g., in exposure of the microbe to natural anti-infective defenses such as antibodies; exposure of a microbe to increased temperature (e.g., during infection); or exposure of the microbe to an environment lacking in cofactors or vitimins.

[0059] As used herein, the term “virulence” includes the degree of pathogenicity of an organism. The term virulence encompasses two features of an organism: its infectivity (the ability to colonize a host) and the severity of the disease produced. As used herein, the term “viability” includes the capacity for cell growth. Viable cells may not actively be multiplying, e.g., may be in a quiescent state, but retain the ability to grow when conditions for growth are more favorable. As used herein, the term “growth” includes the ability to multiply, i.e., by cell division or proliferation.

[0060] NIMR polypeptides, before their identification as being regulated by MarA may have been previously found to have one or more other functions, e.g., as set forth in Table 2 below:

TABLE 2

| Physiological function | NIMR genes |
|---|---|
| Energy metabolism, carbon | aceE, aceF, ackA, acnA, |
| | aldA, fumC, glpD, gltA, |
| | mdaA, ndh, pflB, pgi, |
| Biosynthesis of cofactors, carriers | zwf accB, cobU, hemB, |
| | gshB, ribA, ribD |
| Carbon compound catabolism | Galk, galT |
| Amino acid biosynthesis and metabolism | TnaA, tnaL |
| Fatty acid biosynthesis | fabB |
| Nucleotide biosynthesis | GuaB, purA |
| Adaptation | inaA |
| Cell Division | tolC |
| Transport/binding proteins | gatA, gatC, fecA, mglB, mtr, |
| | srlA_2, yadG, yadH, |
| | ydeA, b3469 |
| Protection responses | acrA, marA, marB, marR, |
| | nfnB, sodA, tpx, |
| Cell envelope | OmpF, ompX |
| Ribosome constituents | rimK, rplE |
| Macromolecule synthesis, modification | map |

[0061] In isolating or identifying other NIMR molecules, sequence similarity can be shown, e.g., by generating alignments as described in more detail below.

[0062] Preferably, NIMR polypeptides share some amino acid sequence identity with a polypeptide encoded by an NIMR gene set forth in the table above. The nucleic acid sequences of the exemplary NIMR genes set forth in the table above and the polypeptides they encode are available in the art. For example, the nucleic acid and amino acid sequences of the exemplary NIMR genes set forth in Table 1 can be found using the accession numbers listed in Table 1 at the NCBI Entrez site (http://www.ncbi.nlm.nih.gov/). These sequences are also presented in Appendix A.

[0063] As used herein, the term “nucleic acid molecule(s)” includes polyribonucleotides or polydeoxribonucleotides, which may be unmodified RNA or DNA or modified RNA or DNA. As such, “nucleic acid molecule(s)” include, without limitation, single- and double-stranded DNA, DNA that is a mixture of single- and double-stranded regions or single-, double- and triple-stranded regions, single- and double-stranded RNA, and RNA that is mixture of single- and double-stranded regions, hybrid molecules comprising DNA and RNA that may be single-stranded or, more typically, double-stranded, or triple-stranded regions, or a mixture of single- and double-stranded regions. In addition, “nucleic acid molecule” as used herein refers to triple-stranded regions comprising RNA or DNA or both RNA and DNA. The strands in such regions may be from the same molecule or from different molecules. The regions may include all of one or more of the molecules, but more typically involve only a region of some of the molecules. As used herein, the term “nucleic acid molecule” also includes DNAs or RNAs as described above that contain one or more modified bases. Thus, DNAs or RNAs with backbones modified for stability or for other reasons are “nucleic acid molecule(s)” as that term is intended herein. Moreover, DNAs or RNAs comprising unusual bases, such as inosine, or modified bases, such as tritylated bases, to name just two examples, are nucleic acid molecules as the term is used herein. It will be appreciated that a great variety of modifications have been made to DNA and RNA that serve many useful purposes known to those of skill in the art. The term “nucleic acid molecule(s)” as it is employed herein embraces such chemically, enzymatically or metabolically modified forms of nucleic acid molecules, as well as the chemical forms of DNA and RNA characteristic of viruses and cells, including, for example, simple and complex cells. “Nucleic acid molecule(s)” also embraces short nucleic acid molecules often referred to as oligonucleotide(s).

[0064] Preferred NIMR nucleic acid molecules are isolated. An “isolated” nucleic acid molecule is one that is separated from other nucleic acid molecules which are present in the natural source of the nucleic acid. For example, with regard to genomic DNA, (e.g. whether chromosomal or episomal) the term “isolated” includes nucleic acid molecules which are separated from flanking DNA sequences with which the DNA is naturally associated. Preferably, an “isolated” nucleic acid molecule is free of sequences which naturally flank the nucleic acid molecule (i.e., sequences located at the 5′ and 3′ ends of the nucleic acid molecule) in the DNA (e.g., chromosomal or episomal) of the organism from which the nucleic acid molecule is derived. As such, isolated DNA is not in its naturally occurring state (although, as described in more detail below, its sequence may be naturally occurring in the sense that has not been altered (e.g., mutated) from its naturally occurring form). For example, in various embodiments, an isolated NIMR nucleic acid molecule can contain less than about 5 kb, 4 kb, 3 kb, 2 kb, 1 kb, 0.5 kb, 0.1 kb, or 0.05 kb of nucleotide sequences which naturally flank the nucleic acid molecule in DNA of the cell from which the nucleic acid is derived. Moreover, an “isolated” nucleic acid molecule, such as a cDNA molecule, can be substantially free of other cellular material, or culture medium when produced by recombinant techniques, or substantially free of chemical precursors or other chemicals when chemically synthesized. An “isolated” NIMR nucleic acid molecule may, however, be linked to other nucleotide sequences that do not normally flank the NIMR sequences in genomic DNA (e.g., the NIMR nucleotide sequences may be linked to vector sequences). In certain preferred embodiments, an “isolated” nucleic acid molecule, such as a cDNA molecule, also may be free of other cellular material. However, it is not necessary for the NIMR nucleic acid molecule to be free of other cellular material to be considered “isolated” (e.g., an NIMR DNA molecule separated from other chromosomal DNA and inserted into another bacterial cell would still be considered to be “isolated”).

[0065] As used herein, “polypeptide(s)” refers to any peptide or protein comprising two or more amino acids joined to each other by peptide bonds or modified peptide bonds. “Polypeptide(s)” refers to both short chains, commonly referred to as peptides, oligopeptides and oligomers and to longer chains generally referred to as proteins. Polypeptides may contain amino acids other than the 20 gene encoded amino acids. “Polypeptide(s)” include those modified either by natural processes, such as processing and other post-translational modifications, but also by chemical modification techniques. Such modifications are well described in basic texts and in more detailed monographs, as well as in a voluminous research literature, and they are well known to those of skill in the art. It will be appreciated that the same type of modification may be present in the same or varying degree at several sites in a given polypeptide. Also, a given polypeptide may contain many types of modifications. Modifications can occur anywhere in a polypeptide, including the peptide backbone, the amino acid side-chains, and the amino or carboxyl termini. Modifications include, for example, acetylation, acylation, ADP-ribosylation, amidation, covalent attachment of flavin, covalent attachment of a heme moiety, covalent attachment of a nucleotide or nucleotide derivative, covalent attachment of a lipid or lipid derivative, covalent attachment of phosphotidylinositol, cross-linking, cyclization, disulfide bond formation, demethylation, formation of covalent cross-links, formation of cysteine, formation of pyroglutamate, formylation, gamma-carboxylation, glycosylation, GPI anchor formation, hydroxylation, iodination, methylation, myristoylation, oxidation, proteolytic processing, phosphorylation, prenylation, racemization, glycosylation, lipid attachment, sulfation, gamma-carboxylation of glutamic acid residues, hydroxylation and ADP-ribosylation, selenoylation, sulfation, transfer-RNA mediated addition of amino acids to proteins, such as arginylation, and ubiquitination. See, for instance, Proteins—Structure And Molecular Properties, 2^{nd} Ed., T. E. Creighton, W. H. Freeman and Company, New York (1993) and Wold, F., Posttranslational Protein Modifications: Perspectives and Prospects, pgs. 1-12 in Posttranslational Covalent Modification Of Proteins, B. C. Johnson, Ed., Academic Press, New York (1983); Seifter et al., Meth. Enzymol. 182:626-646 (1990) and Rattan et al., Protein Synthesis: Posttranslational Modifications and Aging, Ann. N.Y. Acad. Sci. 663: 48-62 (1992). Polypeptides may be branched or cyclic, with or without branching. Cyclic, branched and branched circular polypeptides may result from post-translational natural processes and may be made by entirely synthetic methods, as well.

[0066] As used herein, an “isolated polypeptide” or “isolated protein” refers to a polypeptide or protein that is substantially free of other polypeptides, proteins, cellular material and culture medium when isolated from cells or produced by recombinant DNA techniques, or chemical precursors or other chemicals when chemically synthesized. An “isolated” or “purified” polypeptide or biologically active portion thereof is substantially free of cellular material or other contaminating polypeptides from the cell or tissue source from which the NIMR polypeptide is derived, or substantially free from chemical precursors or other chemicals when chemically synthesized. The language “substantially free of cellular material” includes preparations of NIMR polypeptide in which the polypeptide is separated from cellular components of the cells from which it is isolated or recombinantly produced. In one embodiment, the language “substantially free of cellular material” includes preparations of NIMR polypeptide having less than about 30% (by dry weight) of non-NIMR polypeptide (also referred to herein as a “contaminating polypeptide”), more preferably less than about 20% of non-NIMR polypeptide, still more preferably less than about 10% of non-NIMR polypeptide, and most preferably less than about 5% non-NIMR polypeptide. When the NIMR polypeptide or biologically active portion thereof is recombinantly produced, it is also preferably substantially free of culture medium, i.e., culture medium represents less than about 20%, more preferably less than about 10%, and most preferably less than about 5% of the volume of the polypeptide preparation.

[0067] The language “substantially free of chemical precursors or other chemicals” includes preparations of NIMR polypeptide in which the polypeptide is separated from chemical precursors or other chemicals that are involved in the synthesis of the polypeptide. In one embodiment, the language “substantially free of chemical precursors or other chemicals” includes preparations of NIMR polypeptide having less than about 30% (by dry weight) of chemical precursors or non-NIMR chemicals, more preferably less than about 20% chemical precursors or non-NIMR chemicals, still more preferably less than about 10% chemical precursors or non-NIMR chemicals, and most preferably less than about 5% chemical precursors or non-NIMR chemicals.

[0068] Preferred NIMR nucleic acid molecules and polypeptides are “naturally occurring.” As used herein, a “naturally-occurring” molecule refers to an NIMR molecule having a nucleotide sequence that occurs in nature (e.g., encodes a natural NIMR polypeptide). In addition, naturally or non-naturally occurring variants of these polypeptides and nucleic acid molecules which retain the same functional activity, e.g., the ability to modulate adaptation to stress and/or virulence in a microbe. Such variants can be made, e.g., by mutation using techniques that are known in the art. Alternatively, variants can be chemically synthesized.

[0069] As used herein the term “variant(s)” includes nucleic acid molecules or polypeptides that differ in sequence from a reference nucleic acid molecule or polypeptide, but retain its essential properties. Changes in the nucleotide sequence of the variant may or may not alter the amino acid sequence of a polypeptide encoded by the reference nucleic acid molecule. Nucleotide changes may result in amino acid substitutions, additions, deletions, fusions and truncations in the polypeptide encoded by the reference sequence, as discussed below. A typical variant of a polypeptide differs in amino acid sequence from another, reference polypeptide. Generally, differences are limited so that-the sequences of the reference polypeptide and the variant are closely similar overall and, in many regions, identical. A variant and reference polypeptide may differ in amino acid sequence by one or more substitutions, additions, and/or deletions in any combination. A variant of a nucleic acid molecule or polypeptide may be naturally occurring, such as an allelic variant, or it may be a variant that is not known to occur naturally. Non-naturally occurring variants of nucleic acid molecules and polypeptides may be made by mutagenesis techniques, by direct synthesis, and by other recombinant methods known to skilled artisans.

[0070] For example, it will be understood that the NIMR polypeptides described herein are also meant to include equivalents thereof. Such variants can be made, e.g., by mutation using techniques that are known in the art. Alternatively, variants can be chemically synthesized. For instance, mutant forms of NIMR polypeptides which are functionally equivalent, (e.g., have the ability to bind to DNA and to regulate transcription from an operon) can be made using techniques which are well known in the art. Mutations can include, e.g., at least one of a discrete point mutation which can give rise to a substitution, or by at least one deletion or insertion. For example, random mutagenesis can be used. Mutations can also be made by random mutagenesis or using cassette mutagenesis. For the former, the entire coding region of a molecule is mutagenized by one of several methods (chemical, PCR, doped oligonucleotide synthesis) and that collection of randomly mutated molecules is subjected to selection or screening procedures. In the latter, discrete regions of a polypeptide, corresponding either to defined structural or functional determinants are subjected to saturating or semi-random mutagenesis and these mutagenized cassettes are re-introduced into the context of the otherwise wild type allele. In one embodiment, PCR mutagenesis can be used. For example, Megaprimer PCR can be used (O. H. Landt, 1990. Gene 96:125-128).

[0071] In certain embodiments, such variants have at least about 25, 30, 35, 40, 45, 50, or 60% or more amino acid identity with a naturally occurring NIMR polypeptide. In preferred embodiments, such variants have at least about 70% amino acid identity with a naturally occurring NIMR polypeptide. In more preferred embodiments, such variants have at least about 80% amino acid identity with a naturally occurring NIMR polypeptide. In particularly preferred embodiments, such variants have at least about 90% amino acid identity and preferably at least about 95% amino acid identity with a naturally occurring NIMR polypeptide.

[0072] In yet other embodiments, a nucleic acid molecule encoding a variant of an NIMR polypeptide is capable of hybridizing under stringent conditions to a nucleic molecule encoding a naturally occurring NIMR polypeptide.

[0073] Preferred NIMR nucleic acid molecules and NIMR polypeptides are “naturally occurring.” As used herein, a “naturally-occurring” molecule refers to an NIMR polypeptide encoded by a nucleotide sequence that occurs in nature (e.g., encodes a natural NIMR polypeptide). Such molecules can be obtained from other microbes, e.g., based on their sequence similarity to the NIMR molecules described herein.

[0074] In addition, naturally or non-naturally occurring variants of these polypeptides and nucleic acid molecules which retain the same functional activity, e.g., the ability to modulate microbial responses to environmental stress and, thereby, modulate microbial adaptation to stress and/or microbial virulence are also within the scope of the invention. Such variants can be made, e.g., by mutation using techniques which are known in the art. Alternatively, variants can be chemically synthesized.

[0075] As used herein, “heterologous DNA” or “heterologous nucleic acid” includes DNA that does not occur naturally in the cell (e.g., as part of the genome) in which it is present or which is found in a location or locations in the genome that differs from that in which it occurs in nature or which is operatively linked to DNA to which it is not normally linked in nature (i.e., a gene that has been operatively linked to a heterologous promoter). Heterologous DNA is 1) not naturally occurring in a particular position (e.g., at a particular position in the genomp) or 2) is not endogenous to the cell into which it is introduced, but has been obtained from another cell. Heterologous DNA can be from the same species or from a different species. Any DNA that one of skill in the art would recognize or consider as heterologous or foreign to the cell in which is expressed is herein encompassed by the term heterologous DNA.

[0076] The terms “heterologous protein”, “recombinant protein”, and “exogenous protein” are used interchangeably throughout the specification and refer to a polypeptide which is produced by recombinant DNA techniques, wherein generally, DNA encoding the polypeptide is inserted into a suitable expression vector which is in turn used to transform a host cell to produce the heterologous protein. That is, the polypeptide is expressed from a heterologous nucleic acid molecule.

[0077] The term “interact” includes close contact between molecules that results in a measurable effect, e.g., on the conformation and/or activity of at least one of the molecules involved in the interaction. For example, a first molecule can be said to interact with a second when it inhibits the binding of the second molecule to a target (e.g., a DNA or polypeptide target) to which that second molecule normally binds, or when it alters the activity of the second molecule, e.g., by steric interaction with a domain of the second molecule that mediates its activity. For example, compounds can interact with (e.g., by binding) to an NIMR polypeptide and alter the activity of the NIMR polypeptide or can interact with (e.g., by binding) to an NIMR nucleic acid molecule and alter transcription of an NIMR polypeptide from that nucleic acid molecule.

[0078] As used herein, the term “NIMR binding polypeptide” includes polypeptides that normally interact with NIMR nucleic acid molecules or NIMR polypeptides under physiological conditions in a cell, e.g., and alter transcription of an NIMR nucleic acid molecule or activity of an NIMR polypeptide.

[0079] As used herein, the term “drug” includes antibiotic agents and non-antibiotic agents. The term “drug” includes antiinfective compounds which are static or cidal for microbes, e.g., an antimicrobial compound which inhibits the growth and/or viability of a microbe. Preferred antiinfective compounds increase the susceptibility of microbes to antibiotics or decrease the infectivity or virulence of a microbe. The term “drug” includes the antimicrobial agents such as disinfectants, antiseptics, and surface delivered compounds. For example, antibiotics or other types of antibacterial compounds, including agents which induce oxidative stress, and organic solvents are included in this term. The term “drug” also includes biocides. The term “biocide” is art recognized and includes an agent that is thought to kill a cell “non-specifically,” or a broad spectrum agent whose mechanism of action is unknown as well as drugs that are known to be target-specific (e.g., triclosan). Examples of biocides include paraben, chlorbutanol, phenol, alkylating agents such as ethylene oxide and formaldehyde, halides, mercurials and other heavy metals, detergents, acids, alkalis, and chlorhexidine. Other biocidal agents include: pine oil, quaternary amine compounds such as alkyl dimethyl benzyl ammonium chloride, chloroxylol, chlorhexidine, cyclohexidine, triclocarbon, and disinfectants. The term “bactericidal” refers to an agent that can kill a bacterium; “bacteriostatic” refers to an agent that inhibits the growth of a bacterium.

[0080] The term “antibiotic” is art recognized and includes antimicrobial agents synthesized by an organism in nature and isolated from this natural source, and chemically synthesized drugs. The term includes but is not limited to: polyether ionophores such as monensin and nigericin; macrolide antibiotics such as erythromycin and tylosin; aminoglycoside antibiotics such as streptomycin and kanamycin; β-lactam antibiotics (having a β lactam ring) such as penicillin and cephalosporin; and polypeptide antibiotics such as subtilisin and neosporin. Semi-synthetic derivatives of antibiotics, and antibiotics produced by chemical methods are also encompassed by this term. Chemically-derived antimicrobial agents such as isoniazid, trimethoprim, quinolones, fluoroquinolones and sulfa drugs are considered antibacterial drugs, and the term antibiotic includes these. It is within the scope of the screens of the present invention to include compounds derived from natural products and compounds that are chemically synthesized.

[0081] The phrase “non-antibiotic agent” includes agents that are not art recognized as being antibiotics. Exemplary non-antibiotic agents include, e.g., biocides, disinfectants or antiinfectives. Non antibiotic agents also include compounds incorporated into consumer goods, e.g., for topical use on a subject or as cleaning products. In contrast to the term “biocide,” an antibiotic or an “anti-microbial drug approved for human use” is considered to have a specific molecular target in a microbial cell. Preferably a microbial target of a therapeutic agent is sufficiently different from its physiological counterpart in a subject in need of treatment that the antibiotic or drug has minimal adverse effects on the subject.

[0082] The term “microbe” includes microorganisms expressing or made to express an NMIR polypeptide. “Microbes” are of some economic importance, e.g., are environmentally inportant or are important as human pathogens. For example, in one embodiment microbes cause environmental problems, e.g., fouling or spoilage, or perform useful functions such as breakdown of plant matter. In another embodiment, microbes are organisms that live in or on mammals and are medically important. Preferably microbes are unicellular and include bacteria, fungi, or protozoa. In another embodiment, microbes suitable for use in the invention are multicellular, e.g., parasites or fungi. In preferred embodiments, microbes are pathogenic for humans, animals, or plants. Microbes may be used as intact cells or as sources of materials for cell-free assays as described herein.

[0083] As used herein the term “reporter gene” includes any gene that encodes an easily detectable product that is operably linked to a promoter. By operably linked it is meant that under appropriate conditions an RNA polymerase may bind to the promoter of the regulatory region and proceed to transcribe the nucleotide sequence of the reporter gene. In certain embodiments, however, it may be desirable to include other sequences, e.g., transcriptional regulatory sequences, in the reporter gene construct. For example, modulation of the activity of the promoter may be affected by altering the RNA polymerase binding to the promoter region, or, alternatively, by interfering with initiation of transcription or elongation of the mRNA. Thus, sequences which are herein collectively referred to as transcriptional regulatory elements or sequences may also be included in the reporter gene construct. In addition, the construct may include sequences of nucleotides that alter translation of the resulting mRNA, thereby altering the amount of reporter gene product.

[0084] As used herein the term “test compound” includes agent(s) that are tested using the assays of the invention to determine whether they modulate the activity or expression of an NIMR polypeptide. More than one compound, e.g., a plurality of compounds, can be tested at the same time for their ability to modulate the activity or expression of an NIMR polypeptide sequence in a screening assay.

[0085] Test compounds that can be assayed in the subject assays include antibiotic and non-antibiotic compounds. In one embodiment, test compounds include candidate detergent or disinfectant compounds. Exemplary compounds which can be screened for activity include, but are not limited to, peptides, non-peptidic compounds, nucleic acids, carbohydrates, small organic molecules (e.g., polyketides), and natural product extract libraries. The term “non-peptidic compound” is intended to encompass compounds that are comprised, at least in part, of molecular structures different from naturally-occurring L-amino acid residues linked by natural peptide bonds. However, “non-peptidic compounds” are intended to include compounds composed, in whole or in part, of peptidomimetic structures, such as D-amino acids, non-naturally-occurring L-amino acids, modified peptide backbones and the like, as well as compounds that are composed, in whole or in part, of molecular structures unrelated to naturally-occurring L-amino acid residues linked by natural peptide bonds. “Non-peptidic compounds” also are intended to include natural products.

[0086] As used herein, the term “antibody” is intended to include immunoglobulin molecules and immunologically active portions of immunoglobulin molecules, i.e., molecules that contain an antigen binding site which binds (immunoreacts with) an antigen, such as Fab and F(ab′)₂ fragments, single chain antibodies, intracellular antibodies, scFv, Fd, or other fragments. Preferably, antibodies of the invention bind specifically or substantially specifically to NIMR molecules. The terms “monoclonal antibodies” and “monoclonal antibody composition”, as used herein, refer to a population of antibody molecules that contain only one species of an antigen binding site capable of immunoreacting with a particular epitope of an antigen, whereas the term “polyclonal antibodies” and “polyclonal antibody composition” refer to a population of antibody molecules that contain multiple species of antigen binding sites capable of interacting with a particular antigen. A monoclonal antibody composition thus typically display a single binding affinity for a particular antigen with which it immunoreacts.

[0087] The phrase “specifically” with reference to binding, recognition, or reactivity of antibodies includes antibodies which bind to a naturally occurring NIMR molecule, but are substantially unreactive with other unrelated molecules. Preferably, such antibodies bind to an NIMR molecule (or its homolog from another species) and bind to non-NIMR molecules (or unrelated NIMR molecules) with only background binding. Antibodies specific for NIMR family molecules from one source may or may not be reactive with NIMR molecules from different species. Antibodies specific for naturally occurring NIMR molecules may or may not bind to mutant forms of such molecules. Assays to determine affinity and specificity of binding are known in the art, including competitive and non-competitive assays. Assays of interest include ELISA, RIA, flow cytometry, etc.

[0088] II. Compositions Which Modulate Antibiotic Resistance

[0089] A. Nucleic Acid Molecules

[0090] In one aspect, the invention provides isolated nucleic acid molecules comprising or consisting essentially NIMR nucleotide sequences. In another aspect, the invention provides nucleic acid molecules consisting of NIMR nucleotide sequences. Exemplary NIMR molecules are shown in Table 1.

[0091] NIMR genes have structural similarity (e.g., to the sequence shown in Table 1) and, preferably, encode NIMR polypeptides having an NIMR polypeptide activity. For example, in one embodiment, an NIMR polypeptide is capable of modulating microbial responses to environmental stress and, thereby, modulating microbial adaptation to stress and/or microbial virulence. Preferably, NIMR polypeptidess modulate resistance to drugs. In one embodiment, NIMR polypeptides modulate resistance to non-antibiotic compounds. In another embodiment, NIMR polypeptidess modulate resistance to antibiotics.

[0092] There is a known and definite correspondence between the amino acid sequence of a particular protein and the nucleotide sequences that can code for the protein, as defined by the genetic code (shown below). Likewise, there is a known and definite correspondence between the nucleotide sequence of a particular nucleic acid molecule and the amino acid sequence encoded by that nucleic acid molecule, as defined by the genetic code.

GENETIC CODE

| | |
|---|---|
| Alanine (Ala, A) | GCA, GCC, GCG, GCT |
| Arginine (Arg, R) | AGA, ACG, CGA, CGC, CGG, CGT |
| Asparagine (Asn, N) | AAC, AAT |
| Aspartic acid | GAC, GAT |
| (Asp, D) | |
| Cysteine (Cys, C) | TGC, TGT |
| Glutamic acid | GAA, GAG |
| (Glu, E) | |
| Glutamine (Gln, Q) | CAA, CAG |
| Glycine (Gly, G) | GGA, GGC, GGG, GGT |
| Histidine (His, H) | CAC, CAT |
| Isoleucine (Ile, I) | ATA, ATC, ATT |
| Leucine (Leu, L) | CTA, CTC, CTG, CTT, TTA, TTG |
| Lysine (Lys, K) | AAA, AAG |
| Methionine (Met, M) | ATG |
| Phenylalanine | TTC, TTT |
| (Phe, F) | |
| Proline (Pro, P) | CCA, CCC, CCG, CCT |
| Serine (Ser, S) | AGC, AGT, TCA, TCC, TCG, TCT |
| Threonine (Thr, T) | ACA, ACC, ACG, ACT |
| Tryptophan (Trp, W) | TGG |
| Tyrosine (Tyr, Y) | TAC, TAT |
| Valine (Val, V) | GTA, GTC, GTG, GTT |
| Termination signal | TAA, TAG, TGA |
| (end) | |

[0093] An important and well known feature of the genetic code is its redundancy, whereby, for most of the amino acids used to make proteins, more than one coding nucleotide triplet may be employed (illustrated above). Therefore, a number of different nucleotide sequences may code for a given amino acid sequence. Such nucleotide sequences are considered functionally equivalent since they result in the production of the same amino acid sequence in all organisms (although certain organisms may translate some sequences more efficiently than they do others). Moreover, occasionally, a methylated variant of a purine or pyrimidine may be found in a given nucleotide sequence. Such methylations do not affect the coding relationship between the trinucleotide codon and the corresponding amino acid.

[0094] In view of the foregoing, the nucleotide sequence of a DNA or RNA molecule coding for an NIMR polypeptide of the invention (or a portion thereof) can be used to derive the NIMR amino acid sequence, using the genetic code to translate the DNA or RNA molecule into an amino acid sequence. Likewise, for any NIMR-amino acid sequence, corresponding nucleotide sequences that can encode an NIMR protein can be deduced from the genetic code (which, because of its redundancy, will produce multiple nucleic acid sequences for any given amino acid sequence). Thus, description and/or disclosure herein of an NIMR related nucleotide sequence should be considered to also include description and/or disclosure of the amino acid sequence encoded by the nucleotide sequence. Similarly, description and/or disclosure of an NIMR amino acid sequence herein should be considered to also include description and/or disclosure of all possible nucleotide sequences that can encode the amino acid sequence.

[0095] One aspect of the invention pertains to isolated nucleic acid molecules that encode NIMR proteins or biologically active portions thereof, as well as nucleic acid fragments sufficient for use as hybridization probes to identify NIMR-encoding nucleic acids (e.g., NIMR mRNA) and fragments for use as PCR primers for the amplification or mutation of NIMR nucleic acid molecules. It will be understood that in discussing the uses of NIMR nucleic acid molecules, e.g., as shown in Table 1, that fragments of such nucleic acid molecules as well as full length NIMR nucleic acid molecules can be used.

[0096] A nucleic acid molecule of the present invention, e.g., a nucleic acid molecule having the nucleotide sequence of an NIMR molecule shown in Table 1, or a portion thereof, can be isolated using standard molecular biology techniques and the sequence information provided herein. For example, using all or portion of an NIMR nucleic acid sequence as a hybridization probe, NIMR nucleic acid molecules can be isolated using standard hybridization and cloning techniques (e.g., as described in Sambrook, J., Fritsh, E. F., and Maniatis, T. Molecular Cloning: A Laboratory Manual. 2nd, ed, Cold Spring Harbor Laboratory, Cold Spring Harbor Laboratory Press, Cold Spring Harbor, N.Y., 1989). Moreover, a nucleic acid molecule encompassing all or a portion of an NIMR nucleotide sequence can be isolated by the polymerase chain reaction (PCR) using synthetic oligonucleotide primers designed based upon an NIMR nucleotide sequence (e.g., from a different species of microbe).

[0097] A nucleic acid molecule of the invention can be amplified using cDNA, mRNA or alternatively, genomic DNA, as a template and appropriate oligonucleotide primers according to standard PCR and/or RT PCR amplification techniques. The nucleic acid so amplified can be cloned into an appropriate vector and characterized by DNA sequence analysis. Furthermore, oligonucleotides corresponding to NIMR nucleotide sequences can be prepared by standard synthetic techniques, e.g., using an automated DNA synthesizer.

[0098] In another preferred embodiment, an isolated nucleic acid molecule of the invention comprises a nucleic acid molecule which is a complement of a nucleotide sequence of an NIMR gene presented in Table 1 or a portion of the nucleotide sequence. A nucleic acid molecule which is complementary to the nucleotide sequence of an NIMR gene shown in Table 1 is one which is sufficiently complementary to the nucleotide sequence of an NIMR gene presented in Table 1, such that it can hybridize to the nucleotide sequence of an NIMR gene shown in Table 1, thereby forming a stable duplex.

[0099] In addition to the nucleic acid molecule shown in Table 1, other NIMR nucleotide sequences of the invention are “structurally related” (i.e., share sequence identity with) the NIMR nucleotide sequence of the NIMR molecules listed in Table 1. Such sequence similarity can be shown, e.g., by optimally aligning the NIMR nucleotide sequence with a putative NIMR nucleotide sequence using an alignment program for purposes of comparison and comparing corresponding positions. In a preferred embodiment, an isolated nucleic acid molecule of the invention comprises the nucleotide sequence of one of the molecules listed in Table 1.

[0100] In still another preferred embodiment, an isolated nucleic acid molecule of the present invention comprises a nucleotide sequence which is at least about 25, 30, 35, 40, 45, 50, or 60% or more homologous to a naturally occurring NIMR polypeptide. In another embodiment, an isolated nucleic acid molecule of the invention comprises a nucleotide sequence which is at least about 25, 30, 35, 40, 45, 50, or 60% or more amino acid identity with a naturally occurring NIMR polypeptide. In another embodiment, an isolated nucleic acid molecule of the invention comprises a nucleotide sequence which is at least about 65%, 70%, 75%, 80%, 85%, 90%, 95%, 98% or more homologous to a nucleotide sequence (e.g., to the entire length of a nucleotide sequence) of an NIMR molecule shown in Table 1 or a portion thereof.

[0101] In other embodiments, a nucleic acid molecule of the invention has at least 25, 30, 35, 40, 45, 50, 60, or 70% identity, more preferably 80% identity, and even more preferably 90% identity with a nucleic acid molecule comprising: at least about 100, 200, 300, 400, 500, 600, or at about 700 nucleotides of an NIMR molecule listed in Table 1.

[0102] Sequence similarity can be shown, e.g., by optimally aligning NIMR nucleotide or amino acid sequences for purposes of comparison using an alignment program and comparing corresponding positions of the sequences. To determine the degree of similarity between sequences, they can be aligned for optimal comparison purposes (e.g., gaps may be introduced in the sequence of one polypeptide or nucleic acid molecule for optimal alignment with the other polypeptide or nucleic acid molecule with which they are to be compared). The amino acid residues or bases at a given position are then compared with the corresponding amino acid residue or base in the sequence with which they are being compared. When a position in one sequence is occupied by the same amino acid residue or by the same base as the corresponding position in the other sequence, then the sequences are identical at that position. If amino acid residues are not identical, they may be similar. As used herein, an amino acid residue is “similar” to another amino acid residue if the two amino acid residues are members of the same family of residues having similar side chains. Families of amino acid residues having similar side chains have been defined in the art (see, for example, Altschul et al. 1990. J. Mol. Biol. 215:403) including basic side chains (e.g., lysine, arginine, histidine), acidic side chains (e.g., aspartic acid, glutamic acid), uncharged polar side chains (e.g., glycine, asparagine, glutamine, serine, threonine, tyrosine, cysteine), nonpolar side chains (e.g., alanine, valine, leucine, isoleucine, proline, phenylalanine, methionine, tryptophan), beta-branched side chains (e.g., threonine, valine, isoleucine) and aromatic side chains (e.g., tyrosine, phenylalanine, tryptophan.) The degree (percentage) of similarity between sequences, therefore, is a function of the number of identical or similar positions shared by two sequences (i.e., % homology=# of identical or similar positions/total # of positions×100). Alignment strategies are well known in the art; see, for example, Altschul et al. supra for optimal sequence alignment.

[0103] Nucleic acid molecules that exist as an active functional unit, e.g., mRNA molecules, will be expected to have a higher degree of structural identity among homologs. It will be understood that among divergent organisms, there will be a lower degree of structural relatedness among the nucleic acid molecules that encode functional homologs.

[0104] Preferably, NIMR polypeptides share some amino acid sequence similarity with a polypeptide encoded by an NIMR gene of a molecule listed in Table 1. The nucleic acid and/or amino acid sequences of an NIMR gene or polypeptide (e.g., as provided above) can be used as “query sequence” to perform a search against databases (e.g., either public or private such as http://www.tigr.org) to, for example, identify other NIMR genes (or polypeptides) having related sequences. For example, such searches can be performed, e.g., using the NBLAST and XBLAST programs (version 2.0) of Altschul, et al. (1990) J. Mol. Biol. 215:403-10. BLAST nucleotide searches can be performed with the NBLAST program, score=100, wordlength=12 to obtain nucleotide sequences homologous to the above NIMR nucleic acid molecules. BLAST polypeptide searches can be performed with the XBLAST program, score=50, wordlength=3 to obtain amino acid sequences homologous to NIMR polypeptide molecules of the invention. To obtain gapped alignments for comparison purposes, Gapped BLAST can be utilized as described in Altschul et al., (1997) Nucleic Acids Res. 25(17):3389-3402. When utilizing BLAST and Gapped BLAST programs, the default parameters of the respective programs (e.g., XBLAST and NBLAST) can be used. See http://www.ncbi.nlm.nih.gov.

[0105] However, it will be understood that the level of sequence identity among microbial genes, even though members of the same family, is not necessarily high. This is particularly true in the case of divergent genomes where the level of sequence identity may be low, e.g., less than 20% (e.g., B. burgdorferi as compared e.g., to B. subtilis). Accordingly, structural similarity among NIMR-molecules can also be determined based on “three-dimensional correspondence” of amino acid residues. As used herein, the language “three-dimensional correspondence” is meant to includes residues which spatially correspond, e.g., are in the same functional position of an NIMR polypeptide member as determined, e.g., by x-ray crystallography, but which may not correspond when aligned using a linear alignment program. The language “three-dimensional correspondence” also includes residues which perform the same function, e.g., bind to DNA or bind the same cofactor, as determined, e.g., by mutational analysis.

[0106] Nucleic acid molecules that differ in nucleotide sequence from those NIMR molecules listed in Table 1 due to degeneracy of the genetic code, and thus encode the same NIMR protein as are encompassed by the invention. Accordingly, in another embodiment, an isolated nucleic acid molecule of the invention has a nucleotide sequence encoding a protein having an amino acid sequence of an NIMR molecule listed in Table 1.

[0107] In addition to the nucleotide sequences of the NIMR molecules shown in Table 1, it will be appreciated by those skilled in the art that DNA sequence polymorphisms that lead to changes in the amino acid sequences of a given NIMR polypeptide may exist within a population of organisms. Such nucleotide variations and resulting amino acid polymorphisms in NIMR genes that are the result of natural allelic variation and that do not alter the functional activity of an NIMR polypeptide are intended to be within the scope of the invention.

[0108] Moreover, nucleic acid molecules encoding functional NIMR polypeptides but which have a nucleotide sequence which differs from an NIMR nucleotide sequence of a molecule listed in Table 1 are intended to be within the scope of the invention. Nucleic acid molecules encoding functional homologs of the NIMR proteins listed in Table 1, e.g., from different species, and thus which have a nucleotide sequence which differs from the NIMR sequence of the NIMR molecules listed in Table 1 are intended to be within the scope of the invention. Given the list of NIMR genes set forth in Table 1, NIMR homologs can be readily identified by one of ordinary skill in the art, e.g., by structural similarity to the NIMR nucleotide sequences provided using standard techniques.

[0109] For example, NIMR nucleic acid molecules can be identified as being structurally similar to the exemplary NIMR gene set forth herein based on their ability to hybridize to the nucleic acid molecule listed in Table 1 under stringent conditions. For example, an NIMR DNA can be isolated from a DNA library using all or portion of a nucleotide sequence of an NIMR molecule from Table 1 as a hybridization probe and standard hybridization techniques (e.g., as described in Sambrook, J., et al. Molecular Cloning: A Laboratory Manual. 2nd, ed., Cold Spring Harbor Laboratory, Cold Spring Harbor, N.Y., 1989; Cohen et al. 1993. J. of Infectious Diseases. 168:484)).

[0110] As used herein, the term “hybridizes under stringent conditions” is intended to describe conditions for hybridization and washing under which nucleotide sequences at least 30%, 40%, 50%, or 60% homologous to each other typically remain hybridized to each other. Preferably, the conditions are such that sequences at least about 70%, more preferably at least about 80%, even more preferably at least about 85% or 90% homologous to each other typically remain hybridized to each other. Preferably, an isolated nucleic acid molecule of the invention that hybridizes under stringent conditions to the-sequence of a molecule from Table 1 or its complement corresponds to a naturally-occurring nucleic acid molecule. Such stringent conditions are known to those skilled in the art and can be found e.g., in Current Protocols in Molecular Biology, John Wiley & Sons, N.Y. (1989), 6.3.1-6.3.6. A preferred, non-limiting example of stringent hybridization conditions are hybridization in 6× sodium chloride/sodium citrate (SSC) at about 45° C., followed by one or more washes in 0.2×SSC, 0.1% SDS at 50-65° C. Conditions for hybridizations are largely dependent on the melting temperature Tm that is observed for half of the molecules of a substantially pure population of a double-stranded nucleic acid. Tm is the temperature in ° C. at which half the molecules of a given sequence are melted or single-stranded. For nucleic acids of sequence 11 to 23 bases, the Tm can be estimated in degrees C. as 2 (number of A+T residues)+4(number of C+G residues). Hybridization or annealing of nucleic acid molecules should be conducted at a temperature lower than the Tm, e.g., 15° C., 20° C., 25° C. or 30° C. lower than the Tm. The effect of salt concentration (in M of NaCl) can also be calculated, see for example, Brown, A., “Hybridization” pp. 503-506, in The Encyclopedia of Molec. Biol., J. Kendrew, Ed., Blackwell, Oxford (1994).

[0111] In addition, NIMR genes can be identified by overexpressing transcriptional activators related to MarA in other microbes and identifying the genes whose expression is controlled by overexpression of the MarA homolog, using techniques similar to those set forth in the instant examples.

[0112] Moreover, the nucleic acid molecules of the invention can comprise only a portion of a full length NIMR nucleic acid sequence. For example a fragment can be used as a probe or primer or a fragment encoding a biologically active portion of an NIMR protein. The nucleotide sequence of the NIMR genes allows for the generation of probes and primers designed for use in identifying and/or cloning other NIMR polypeptides, as well as NIMR homologues from other species. The probe/primer typically comprises a substantially purified oligonucleotide. In one embodiment, the oligonucleotide comprises a region of nucleotide sequence that hybridizes under stringent conditions to at least about 12 or 15, preferably about 20 or 25, more preferably about 30, 35, 40, 45, 50, 55, 60, 65, 75, or 100 consecutive nucleotides of a sense sequence of an NIMR molecule from Table 1 or of a naturally occurring allelic variant or mutant thereof. In another embodiment, a nucleic acid molecule of the present invention comprises a nucleotide sequence which is at least about 200, 300, 400, 500, 600 or 700 nucleotides in length and hybridizes under stringent hybridization conditions to a nucleic acid molecule of Table 1 or the complement thereof.

[0113] Moreover, a nucleic acid molecule encompassing all or a portion of an NIMR gene can be isolated by the polymerase chain reaction using oligonucleotide primers designed based upon the sequence of an NIMR molecule listed in Table 1. For example, RNA can be isolated from cells (e.g., by the guanidinium-thiocyanate extraction procedure of Chirgwin et al. (1979) Biochemistry 18: 5294-5299). and cDNA can be prepared using reverse transcriptase (e.g., Moloney MLV reverse transcriptase, available from Gibco/BRL, Bethesda, Md.; or AMV reverse transcriptase, available from Seikagaku America, Inc., St. Petersburg, Fla.). Synthetic oligonucleotide primers for PCR amplification can be designed based upon an NIMR nucleotide sequence. A nucleic acid molecule of the invention can be amplified using cDNA or, alternatively, genomic DNA, as a template and appropriate oligonucleotide primers according to standard PCR amplification techniques. The nucleic acid so amplified can be sequenced directly or cloned into an appropriate vector and characterized by DNA sequence analysis. Furthermore, oligonucleotides corresponding to an NIMR nucleotide sequence can be prepared by standard synthetic techniques, e.g., using an automated DNA synthesizer.

[0114] In addition to naturally-occurring allelic variants of NIMR sequences that may exist in a population, the skilled artisan will further appreciate that minor changes may be introduced by mutation into an NIMR nucleotide sequences, e.g., of a molecule listed in Table 1, thereby leading to changes in the amino acid sequence of the encoded polypeptide, without altering the functional activity of an NIMR polypeptide. For example, nucleotide substitutions leading to amino acid substitutions at “non-essential” amino acid residues may be made in the sequence of an NIMR molecule of Table 1. A “non-essential” amino acid residue is a residue that can be altered from the wild-type sequence of an NIMR nucleic acid molecule (e.g., the sequence of an NIMR molecule listed in Table 1) without altering the functional activity of an NIMR molecule. Exemplary residues which are non-essential and, therefore, amenable to substitution, can be identified by one of ordinary skill in the art, e.g., by performing an amino acid alignment of NIMR molecules (e.g., NIMR homologs from different species) and determining residues that are not conserved or by alanine scanning mutagenesis. Such residues, because they have not been conserved, are more likely amenable to substitution.

[0115] Accordingly, another aspect of the invention pertains to nucleic acid molecules encoding NIMR proteins that contain changes in amino acid residues that are not essential for an NIMR activity. Such NIMR proteins differ in amino acid sequence from an NIMR molecule listed in Table 1, yet retain an inherent NIMR activity. An isolated nucleic acid molecule encoding a non-natural variant of an NIMR polypeptide can be created by introducing one or more nucleotide substitutions, additions or deletions into the nucleotide sequence of an NIMR molecule of Table 1 such that one or more amino acid substitutions, additions or deletions are introduced into the encoded polypeptide. Mutations can be introduced into an NIMR molecule by standard techniques, such as site-directed mutagenesis and PCR-mediated mutagenesis. Preferably, conservative amino acid substitutions are made at one or more non-essential amino acid residues. A “conservative amino acid substitution” is one in which the amino acid residue is replaced with an amino acid residue having a similar side chain. Families of amino acid residues having similar side chains have been defined in the art, including basic side chains (e.g., lysine, arginine, histidine), acidic side chains (e.g., aspartic acid, glutamic acid), uncharged polar side chains (e.g., glycine, asparagine, glutamine, serine, threonine, tyrosine, cysteine), nonpolar side chains (e.g., alanine, valine, leucine, isoleucine, proline, phenylalanine, methionine, tryptophan), beta-branched side chains (e.g., threonine, valine, isoleucine) and aromatic side chains (e.g., tyrosine, phenylalanine, tryptophan, histidine). Thus, a nonessential amino acid residue in an NIMR polypeptide is preferably replaced with another amino acid residue from the same side chain family.

[0116] Alternatively, in another embodiment, mutations can be introduced randomly along all or part of an NIMR coding sequence, such as by saturation mutagenesis, and the resultant mutants can be screened for activity, to identify mutants that retain functional activity. Following mutagenesis, the encoded NIMR mutant polypeptide can be expressed recombinantly in a host cell and the functional activity of the mutant polypeptide can be determined using assays available in the art for assessing an NIMR activity.

[0117] Yet another aspect of the invention pertains to isolated nucleic acid molecules encoding an NIMR fusion polypeptide. Such nucleic acid molecules, comprising at least a first nucleotide sequence encoding a full-length (an entire) NIMR protein, polypeptide or peptide having an NIMR activity operatively linked to a second nucleotide sequence encoding a non-NIMR protein, polypeptide or peptide, can be prepared by standard recombinant DNA techniques.

[0118] In addition to the nucleic acid molecules encoding NIMR proteins described above, another aspect of the invention pertains to isolated nucleic acid molecules which are antisense thereto. An “antisense” nucleic acid comprises a nucleotide sequence which is complementary to a “sense” nucleic acid encoding a polypeptide, e.g., complementary to the coding strand of a double-stranded cDNA molecule or complementary to an mRNA sequence. Accordingly, an antisense nucleic acid can hydrogen bond to a sense nucleic acid. The antisense nucleic acid can be complementary to an entire NIMR coding strand, or only to a portion thereof. In one embodiment, an antisense nucleic acid molecule is antisense to a “coding region” of the coding strand of a nucleotide sequence encoding NIMR. The term “coding region” refers to the region of the nucleotide sequence comprising codons which are translated into amino acid residues. In another embodiment, the antisense nucleic acid molecule is antisense to a “noncoding region” of the coding strand of a nucleotide sequence encoding NIMR. The term “noncoding region” refers to 5′ and 3′ sequences which flank the coding region that are not translated into amino acids.

[0119] With the coding strand sequences encoding NIMR molecules disclosed herein, antisense nucleic acids of the invention can be designed according to the rules of Watson and Crick base pairing. The antisense nucleic acid molecule can be complementary to the entire coding region of NIMR mRNA, but more preferably is an oligonucleotide which is antisense to only a portion of the coding or noncoding region of NIMR mRNA. For example, the antisense oligonucleotide can be complementary to the region surrounding the translation start site of NIMR mRNA. An antisense oligonucleotide can be, for example, about 5, 10, 15, 20, 25, 30, 35, 40, 45 or 50 nucleotides in length. An antisense nucleic acid of the invention can be constructed using chemical synthesis and enzymatic ligation reactions using procedures known in the art. For example, an antisense nucleic acid (e.g., an antisense oligonucleotide) can be chemically synthesized using naturally occurring nucleotides or variously modified nucleotides designed to increase the biological stability of the molecules or to increase the physical stability of the duplex formed between the antisense and sense nucleic acids, e.g., phosphorothioate derivatives and acridine substituted nucleotides can be used. Examples of modified nucleotides which can be used to generate the antisense nucleic acid include 5-fluorouracil, 5-bromouracil, 5-chlorouracil, 5-iodouracil, hypoxanthine, xantine, 4-acetylcytosine, 5-(carboxyhydroxylmethyl) uracil, 5-carboxymethylaminomethyl-2-thiouridine, 5-carboxymethylaminomethyluracil, dihydrouracil, beta-D-galactosylqueosine, inosine, N6-isopentenyladenine, 1-methylguanine, 1-methylinosine, 2,2-dimethylguanine, 2-methyladenine, 2-methylguanine, 3-methylcytosine, 5-methylcytosine, N6-adenine, 7-methylguanine, 5-methylaminomethyluracil, 5-methoxyaminomethyl-2-thiouracil, beta-D-mannosylqueosine, 5′-methoxycarboxymethyluracil, 5-methoxyuracil, 2-methylthio-N6-isopentenyladenine, uracil-5-oxyacetic acid (v), wybutoxosine, pseudouracil, queosine, 2-thiocytosine, 5-methyl-2-thiouracil, 2-thiouracil, 4-thiouracil, 5-methyluracil, uracil-5-oxyacetic acid methylester, uracil-5-oxyacetic acid (v), 5-methyl-2-thiouracil, 3-(3-amino-3-N-2-carboxypropyl) uracil, (acp3)w, and 2,6-diaminopurine. Alternatively, the antisense nucleic acid can be produced biologically using an expression vector into which a nucleic acid has been subcloned in an antisense orientation (i.e., RNA transcribed from the inserted nucleic acid will be of an antisense orientation to a target nucleic acid of interest).

[0120] The antisense nucleic acid molecules of the invention are typically administered to a subject or generated in situ such that they hybridize with or bind to cellular nucleic acid molecules to thereby inhibit expression of the polypeptide, e.g., by inhibiting transcription and/or translation. The hybridization can be by conventional nucleotide complementarity to form a stable duplex, or, for example, in the case of an antisense nucleic acid molecule which binds to DNA duplexes, through specific interactions in the major groove of the double helix. An example of a route of administration of antisense nucleic acid molecules of the invention include direct injection at a tissue site. Alternatively, antisense nucleic acid molecules can be modified to target selected cells and then administered systemically. For example, for systemic administration, antisense molecules can be modified such that they specifically bind to receptors or antigens expressed on a selected cell surface, e.g., by linking the antisense nucleic acid molecules to peptides or antibodies which bind to cell surface receptors or antigens. The antisense nucleic acid molecules can also be delivered to cells using the vectors described herein. To achieve sufficient intracellular concentrations of the antisense molecules, vector constructs in which the antisense nucleic acid molecule is placed under the control of a strong pol II or pol III promoter are preferred.

[0121] In yet another embodiment, the antisense nucleic acid molecule of the invention is an α-anomeric nucleic acid molecule. An α-anomeric nucleic acid molecule forms specific double-stranded hybrids with complementary RNA in which, contrary to the usual β-units, the strands run parallel to each other (Gaultier et al. (1987) Nucleic Acids. Res. 15:6625-6641). The antisense nucleic acid molecule can also comprise a 2′-o-methylribonucleotide (Inoue et al. (1987) Nucleic Acids Res. 15:6131-6148) or a chimeric RNA-DNA analogue (Inoue et al. (1987) FEBS Lett. 215:327-330).

[0122] In still another embodiment, an antisense nucleic acid of the invention is a ribozyme. Ribozymes are catalytic RNA molecules with ribonuclease activity which are capable of cleaving a single-stranded nucleic acid, such as an mRNA, to which they have a complementary region. Thus, ribozymes (e.g., hammerhead ribozymes (described in Haselhoff and Gerlach (1988) Nature 334:585-591)) can be used to catalytically cleave NIMR mRNA transcripts to thereby inhibit translation of NIMR mRNA. A ribozyme having specificity for an NIMR-encoding nucleic acid can be designed based upon the nucleotide sequence of SEQ ID NO:1. For example, a derivative of a Tetrahymena L-19 IVS RNA can be constructed in which the nucleotide sequence of the active site is complementary to the nucleotide sequence to be cleaved in an NIMR-encoding mRNA. See, e.g., Cech et al. U.S. Pat. No. 4,987,071; and Cech et al. U.S. Pat. No. 5,116,742. Alternatively, NIMR mRNA can be used to select a catalytic RNA having a specific ribonuclease activity from a pool of RNA molecules. See, e.g., Bartel, D. and Szostak, J. W. (1993) Science 261:1411-1418.

[0123] Alternatively, gene expression can be inhibited by targeting nucleotide sequences complementary to the regulatory region of NIMR (e.g., the NIMR promoter and/or enhancers) to form triple helical structures that prevent transcription of the NIMR gene in target cells. See generally, Helene, C. (1991) Anticancer Drug Des. 6(Alekshun, M. A. & Levy, S. B. (1999) J. Bacteriol. 181, 4669-4672):569-84; Helene, C. et al. (1992) Ann. N.Y. Acad. Sci. 660:27-36; and Maher, L. J. (1992) Bioassays 14(12):807-15.

[0124] In yet another embodiment, the NIMR nucleic acid molecules of the present invention can be modified at the base moiety, sugar moiety or phosphate backbone to improve, e.g., the stability, hybridization, or solubility of the molecule. For example, the deoxyribose phosphate backbone of the nucleic acid molecules can be modified to generate peptide nucleic acids (see Hyrup B. et al. (1996) Bioorganic & Medicinal Chemistry 4 (George, A. M. & Levy, S. B. (1983) J. Bacteriol. 155, 541-548): 5-23). As used herein, the terms “peptide nucleic acids” or “PNAs” refer to nucleic acid mimics, e.g., DNA mimics, in which the deoxyribose phosphate backbone is replaced by a pseudopeptide backbone and only the four natural nucleobases are retained. The neutral backbone of PNAs has been shown to allow for specific hybridization to DNA and RNA under conditions of low ionic strength. The synthesis of PNA oligomers can be performed using standard solid phase peptide synthesis protocols as described in Hyrup B. et al. (1996) supra; Perry-O'Keefe et al. Proc. Natl. Acad. Sci. 93: 14670-675.

[0125] PNAs of NIMR nucleic acid molecules can be used in therapeutic and diagnostic applications. For example, PNAs can be used as antisense or antigene agents for sequence-specific modulation of gene expression by, for example, inducing transcription or translation arrest or inhibiting replication. PNAs of NIMR nucleic acid molecules can also be used in the analysis of single base pair mutations in a gene, (e.g., by PNA-directed PCR clamping); as ‘artificial restriction enzymes’ when used in combination with other enzymes, (e.g., S1 nucleases (Hyrup B. (1996) supra)); or as probes or primers for DNA sequencing or hybridization (Hyrup B. et al. (1996) supra; Perry-O'Keefe supra).

[0126] In another embodiment, PNAs of NIMR molecules can be modified, (e.g., to enhance their stability or cellular uptake), by attaching lipophilic or other helper groups to PNA, by the formation of PNA-DNA chimeras, or by the use of liposomes or other techniques of drug delivery known in the art. For example, PNA-DNA chimeras of NIMR nucleic acid molecules can be generated which may combine the advantageous properties of PNA and DNA. Such chimeras allow DNA recognition enzymes, (e.g., RNAse H and DNA polymerases), to interact with the DNA portion while the PNA portion would provide high binding affinity and specificity. PNA-DNA chimeras can be linked using linkers of appropriate lengths selected in terms of base stacking, number of bonds between the nucleobases, and orientation (Hyrup B. (1996) supra). The synthesis of PNA-DNA chimeras can be performed as described in Hyrup B. (1996) supra and Finn P. J. et al. (1996) Nucleic Acids Res. 24 (Hamilton, C. M., Aldea, M., Washburn, B. K., Babitzke, P. & Kushner, S. R. (1989) J. Bacteriol. 171, 4617-4622): 3357-63. For example, a DNA chain can be synthesized on a solid support using standard phosphoramidite coupling chemistry and modified nucleoside analogs, e.g., 5′-(4-methoxytrityl)amino-5′-deoxy-thymidine phosphoramidite, can be used as a between the PNA and the 5′ end of DNA (Mag, M. et al. (1989) Nucleic Acid Res. 17: 5973-88). PNA monomers are then coupled in a stepwise manner to produce a chimeric molecule with a 5′ PNA segment and a 3′ DNA segment (Finn P. J. et al. (1996) supra). Alternatively, chimeric molecules can be synthesized with a 5′ DNA segment and a 3′ PNA segment (Peterser, K. H. et al. (1975) Bioorganic Med. Chem. Lett. 5: 1119-11124).

[0127] In other embodiments, the oligonucleotide may include other appended groups such as peptides (e.g., for targeting host cell receptors in vivo), or agents facilitating transport across the cell membrane (see, e.g., Letsinger et al. (1989) Proc. Natl. Acad. Sci. US. 86:6553-6556; Lemaitre et al. (1987) Proc. Natl. Acad. Sci. USA 84:648-652; PCT Publication No. WO88/09810) or the blood-brain barrier (see, e.g., PCT Publication No. WO89/10134). In addition, oligonucleotides can be modified with hybridization-triggered cleavage agents (See, e.g., Krol et al. (1988) Bio-Techniques 6:958-976) or intercalating agents. (See, e.g., Zon (1988) Pharm. Res. 5:539-549). To this end, the oligonucleotide may be conjugated to another molecule, (e.g., a peptide, hybridization triggered cross-linking agent, transport agent, or hybridization-triggered cleavage agent).

[0128] B. NIMR Polypeptides, Fragments thereof, and Anti-NIMR Antibodies

[0129] One aspect of the invention pertains to isolated NIMR polypeptides, and biologically active portions thereof, as well as polypeptide fragments suitable for use as immunogens to raise anti-NIMR antibodies.

[0130] In one embodiment, native NIMR polypeptides can be isolated from cells or tissue sources by an appropriate purification scheme using standard polypeptide purification techniques. In another embodiment, NIMR polypeptides are produced by recombinant DNA techniques. Alternative to recombinant expression, an NIMR polypeptide or polypeptide can be synthesized chemically using standard peptide synthesis techniques. It will be understood that in discussing the uses of NIMR polypeptides, e.g., as shown in Table 1, that fragments of such polypeptides that are not full length NIMR polypeptides as well as full length NIMR polypeptides can be used.

[0131] Preferably, the NIMR polypeptides comprise the amino acid sequence encoded by the nucleotide sequence of an NIMR molecule or a portion thereof. In another preferred embodiment, the polypeptide comprises the amino acid sequence of an NIMR molecule listed in Table 1 or a portion thereof.

[0132] Preferred NIMR polypeptides are naturally occurring. In other embodiments, the polypeptide has at least about 25, 30, 35, 40, 45, 50, or 60% or more amino acid identity with a naturally occurring NIMR polypeptide. Preferably, the polypeptide has at least about 70% amino acid identity, more preferably 80%, and even more preferably, 90% or 95% amino acid identity with the amino acid sequence of an NIMR molecule shown in Table 1 or a portion thereof. Preferred portions of NIMR polypeptide molecules are biologically active, i.e., encode a portion of the NIMR polypeptide having the ability to modulate microbial responses to environmental stress and, thereby, modulate microbial adaptation to stress and/or microbial virulence.

[0133] In addition, naturally or non-naturally occurring variants of these polypeptides and nucleic acid molecules which retain the same functional activity, e.g., the ability to modulate drug resistance in a cell are also within the scope of the invention. Such variants can be made, e.g., by mutation using techniques which are known in the art. Alternatively, variants can be chemically synthesized.

[0134] For example, it will be understood that the NIMR polypeptides described herein also encompass equivalents thereof. For instance, mutant forms of NIMR polypeptides which are functionally equivalent, (e.g., modulate resistance to environmental challenge) can be made using techniques which are well known in the art. Mutations can include, e.g., at least one of a discrete point mutation which can give rise to a substitution, or by at least one deletion or insertion. For example, random mutagenesis can be used. Mutations can be made by random mutagenesis or using cassette mutagenesis. For the former, the entire coding region of a molecule is mutagenized by one of several methods (chemical, PCR, doped oligonucleotide synthesis) and that collection of randomly mutated molecules is subjected to selection or screening procedures. In the latter, discrete regions of a polypeptide, corresponding either to defined structural or functional determinants (e.g., the extracellular, transmembrane, or cytoplasmic domain) are subjected to saturating or semi-random mutagenesis and these mutagenized cassettes are re-introduced into the context of the otherwise wild type allele. In one embodiment, PCR mutagenesis can be used. For example, Megaprimer PCR can be used (O. H. Landt, 1990. Gene 96:125-128).

[0135] In addition to full length NIMR polypeptides, fragments of NIMR polypeptides and their use are also within the scope of the invention. As used herein, a fragment of an NIMR polypeptide refers to a portion of a full-length NIMR polypeptide which is useful in a screening assay to identify compounds which modulate a biological activity of an NIMR polypeptide (e.g., alter the ability of an NIMR polypeptide to influence drug resistance in a microbe). Accordingly, isolated NIMR polypeptides for use in the instant screening assays can be full length NIMR polypeptides or fragments thereof. Thus, an isolated NIMR polypeptide can comprise, consist essentially of, or consist of an amino acid sequence derived from the full length amino acid sequence of an NIMR polypeptide, provided that it retains an NIMR polypeptide activity.

[0136] Portions of the above described polypeptide suitable for use in the claimed assays, such as those which retain their function (e.g., the ability to modulate drug resistance, the ability to modulate drug efflux from a cell, or those which are critical for binding to other molecules (such as DNA, proteins, or compounds) can be easily determined by one of ordinary skill in the art, e.g, using standard truncation or mutagenesis techniques and used in the instant assays. Exemplary techniques are described by Gallegos et al. (1996. J. Bacteriol. 178:6427). In addition, biologically active portions of an NIMR polypeptide include peptides comprising amino acid sequences sufficiently homologous to or derived from the amino acid sequence of the NIMR polypeptide, which include fewer amino acids than the full length NIMR polypeptides, and exhibit at least one activity of an NIMR polypeptide are also the subject of the invention.

[0137] Other fragments include, for example, truncation polypeptides having a portion of an amino acid sequence of an NIMR molecule shown in Table 1, or of variants thereof, such as a continuous series of residues that includes the amino terminus, or a continuous series of residues that includes the carboxyl terminus. Degradation forms of the polypeptides of the invention in a host cell are also preferred. Further preferred are fragments characterized by structural or functional attributes such as fragments that comprise alpha-helix and alpha-helix forming regions, beta-sheet and beta-sheet-forming regions, turn and turn-forming regions, coil and coil-forming regions, hydrophilic regions, hydrophobic regions, alpha amphipathic regions, beta amphipathic regions, flexible regions, surface-forming regions, substrate binding region, and high antigenic index regions.

[0138] To determine the percent identity of two amino acid sequences or of two nucleic acid sequences, the sequences are aligned for optimal comparison purposes (e.g., gaps can be introduced in one or both of a first and a second amino acid or nucleic acid sequence for optimal alignment). In a preferred embodiment, the length of a reference sequence aligned for comparison purposes is at least 30%, preferably at least 40%, more preferably at least 50%, even more preferably at least 60%, and even more preferably at least 70%, 80%, or 90% of the length of the reference sequence. The residues at corresponding positions are then compared and when a position in one sequence is occupied by the same residue as the corresponding position in the other sequence, then the molecules are identical at that position. The percent identity between two sequences, therefore, is a function of the number of identical positions shared by two sequences (i.e., % identity=# of identical positions/total # of positions×100). The percent identity between the two sequences is a function of the number of identical positions shared by the sequences, taking into account the number of gaps, and the length of each gap, which are introduced for optimal alignment of the two sequences. As used herein amino acid or nucleic acid “identity” is equivalent to amino acid or nucleic acid “homology”.

[0139] The comparison of sequences and determination of percent identity between two sequences can be accomplished using a mathematical algorithm. A non-limiting example of a mathematical algorithm utilized for comparison of sequences is the algorithm of Karlin and Altschul (1990) Proc. Natl. Acad. Sci. USA 87:2264, modified as in Karlin and Altschul (1993) Proc. Natl. Acad. Sci. USA 90:5873. Such an algorithm is incorporated into the NBLAST and XBLAST programs (version 2.0) of Altschul, et al. (1990) J. Mol. Biol. 215:403. BLAST nucleotide searches can be performed with the NBLAST program score=100, wordlength=12 to obtain nucleotide sequences homologous to the nucleic acid molecules of the invention. BLAST polypeptide searches can be performed with the XBLAST program, score=50, wordlength=3 to obtain amino acid sequences homologous to the polypeptide molecules of the invention. To obtain gapped alignments for comparison purposes, Gapped BLAST can be utilized as described in Altschul et al., (1997) Nucleic Acids Research 25(Hamilton, C. M., Aldea, M., Washburn, B. K., Babitzke, P. & Kushner, S. R. (1989) J. Bacteriol. 171, 4617-4622):3389. When utilizing BLAST and Gapped BLAST programs, the default parameters of the respective programs (e.g., XBLAST and NBLAST) can be used. See http://www.ncbi.nlm.nih.gov. Another preferred, non-limiting algorithm utilized for the comparison of sequences is the algorithm of Myers and Miller, CABIOS (1988). Such an algorithm is incorporated into the ALIGN program (version 2.0) which is part of the GCG sequence alignment software package. When utilizing the ALIGN program for comparing amino acid sequences, a PAM120 weight residue table, a gap length penalty of 12, and a gap penalty of 4 can be used.

[0140] Another non-limiting example of a mathematical algorithm utilized for the alignment of polypeptide sequences is the Lipman-Pearson algorithm (Lipman and Pearson (1985) Science 227:1435). When using the Lipman-Pearson algorithm, a PAM250 weight residue table, a gap length penalty of 12, a gap penalty of 4, and a Kutple of 2 can be used. A preferred, non-limiting example of a mathematical algorithm utilized for the alignment of nucleic acid sequences is the Wilbur-Lipman algorithm (Wilbur and Lipman (1983) Proc. Natl. Acad. Sci. USA 80:726). When using the Wilbur-Lipman algorithm, a window of 20, gap penalty of 3, Ktuple of 3 can be used. Both the Lipman-Pearson algorithm and the Wilbur-Lipman algorithm are incorporated, for example, into the MEGALIGN program (e.g., version 3.1.7) which is part of the DNASTAR sequence analysis software package.

[0141] Additional algorithms for sequence analysis are known in the art, and include ADVANCE and ADAM., described in Torelli and Robotti (1994) Comput. Appl. Biosci. 10:3; and FASTA, described in Pearson and Lipman (1988) PNAS 85:2444.

[0142] In a preferred embodiment, the percent identity between two amino acid sequences is determined using the GAP program in the GCG software package, using either a Blosum 62 matrix or a PAM250 matrix, and a gap weight of 16, 14, 12, 10, 8, 6, or 4 and a length weight of 1, 2, 3, 4, 5, or 6. In yet another preferred embodiment, the percent identity between two nucleotide sequences is determined using the GAP program in the GCG software package, using a NWSgapdna. CMP matrix and a gap weight of 40, 50, 60, 70, or 80 and a length weight of 1, 2, 3, 4, 5, or 6.

[0143] Protein alignments can also be made using the Geneworks global polypeptide alignment program (e.g., version 2.5.1) with the cost to open gap set at 5, the cost to lengthen gap set at 5, the minimum diagonal length set at 4, the maximum diagonal offset set at 130, the consensus cutoff set at 50% and utilizing the Pam 250 matrix.

[0144] The nucleic acid and polypeptide sequences of the present invention can further be used as a “query sequence” to perform a search against public databases to, for example, identify other members or related sequences. Such searches can be performed using the NBLAST and XBLAST programs (version 2.0) of Altschul, et al. (1990) J. Mol. Biol. 215:403-10. BLAST nucleotide searches can be performed with the NBLAST program, score=100, wordlength=12 to obtain nucleotide sequences homologous to NIMR nucleic acid molecules of the invention. BLAST polypeptide searches can be performed with the XBLAST program, score=50, wordlength=3 to obtain amino acid sequences homologous to NIMR polypeptide molecules of the invention. To obtain gapped alignments for comparison purposes, Gapped BLAST can be utilized as described in Altschul et al., (1997) Nucleic Acids Res. 25(Hamilton, C. M., Aldea, M., Washburn, B. K., Babitzke, P. & Kushner, S. R. (1989) J. Bacteriol. 171, 4617-4622):3389-3402. When utilizing BLAST and Gapped BLAST programs, the default parameters of the respective programs (e.g., XBLAST and NBLAST) can be used. For example, the nucleotide sequences of the invention can be analyzed using the default Blastn matrix 1-3 with gap penalties set at: existence 11 and extension 1. The amino acid sequences of the invention can be analyzed using the default settings: the Blosum62 matrix with gap penalties set at existence 11 and extension 1. See http://www.ncbi.nlm.nih.gov.

[0145] The invention also provides NIMR chimeric or fusion polypeptides. As used herein, an NIMR “chimeric polypeptide” or “fusion polypeptide” comprises an NIMR polypeptide operatively linked to a non-NIMR polypeptide. An “NIMR polypeptide” refers to a polypeptide having an amino acid sequence corresponding to NIMR polypeptide, whereas a “non-NIMR polypeptide” refers to a polypeptide having an amino acid sequence corresponding to a polypeptide which is not substantially homologous to the NIMR polypeptide, e.g., a polypeptide which is different from the NIMR polypeptide and which is derived from the same or a different organism. Within an NIMR fusion polypeptide the NIMR polypeptide can correspond to all or a portion of an NIMR polypeptide. In a preferred embodiment, an NIMR fusion polypeptide comprises at least one biologically active portion of an NIMR polypeptide. Within the fusion polypeptide, the term “operatively linked” is intended to indicate that the NIMR polypeptide and the non-NIMR polypeptide are fused in-frame to each other. The non-NIMR polypeptide can be fused to the N-terminus or C-terminus of the NIMR polypeptide.

[0146] For example, in one embodiment, the fusion polypeptide is a GST-NIMR member fusion polypeptide in which the NIMR member sequences are fused to the C-terminus of the GST sequences. In another embodiment, the fusion polypeptide is an NIMR-HA fusion polypeptide in which the NIMR member nucleotide sequence is inserted in a vector such as pCEP4-HA vector (Herrscher, R. F. et al. (1995) Genes Dev. 9:3067-3082) such that the NIMR member sequences are fused in frame to an influenza hemagglutinin epitope tag. Such fusion polypeptides can facilitate the purification of a recombinant NIMR polypeptide.

[0147] Fusion polypeptides and peptides produced by recombinant techniques may be secreted and isolated from a mixture of cells and medium containing the polypeptide or peptide. Alternatively, the polypeptide or peptide may be retained cytoplasmically and the cells harvested, lysed and the polypeptide isolated. A cell culture typically includes host cells, media and other byproducts. Suitable media for cell culture are well known in the art. Polypeptides can be isolated from cell culture media, host cells, or both using techniques known in the art for purifying polypeptides and peptides. Techniques for transfecting host cells and purifying polypeptides and peptides are known in the art.

[0148] Preferably, an NIMR fusion polypeptide of the invention is produced by standard recombinant DNA techniques. For example, DNA fragments coding for the different polypeptide sequences are ligated together in-frame in accordance with conventional techniques, for example employing blunt-ended or stagger-ended termini for ligation, restriction enzyme digestion to provide for appropriate termini, filling-in of cohesive ends as appropriate, alkaline phosphatase treatment to avoid undesirable joining, and enzymatic ligation. In another embodiment, the fusion gene can be synthesized by conventional techniques including automated DNA synthesizers. Alternatively, PCR amplification of gene fragments can be carried out using anchor primers which give rise to complementary overhangs between two consecutive gene fragments which can subsequently be annealed and reamplified to generate a chimeric gene sequence (see, for example, Current Protocols in Molecular Biology, eds. Ausubel et al. John Wiley & Sons: 1992). Moreover, many expression vectors are commercially available that already encode a fusion moiety (e.g., a GST polypeptide or an HA epitope tag). A NIMR encoding nucleic acid molecule can be cloned into such an expression vector such that the fusion moiety is linked in-frame to the NIMR polypeptide.

[0149] In another embodiment, the fusion polypeptide is an NIMR polypeptide containing a heterologous signal sequence at its N-terminus. In certain host cells (e.g., mammalian host cells), expression and/or secretion of NIMR can be increased through use of a heterologous signal sequence. The NIMR fusion polypeptides of the invention can be incorporated into pharmaceutical compositions and administered to a subject in vivo. Use of NIMR fusion polypeptides may be useful therapeutically for the treatment of infection. Moreover, the NIMR-fusion polypeptides of the invention can be used as immunogens to produce anti-NIMR antibodies in a subject.

[0150] Preferably, an NIMR chimeric or fusion polypeptide of the invention is produced by standard recombinant DNA techniques. For example, DNA fragments coding for the different polypeptide sequences are ligated together in-frame in accordance with conventional techniques, for example by employing blunt-ended or stagger-ended termini for ligation, restriction enzyme digestion to provide for appropriate termini, filling-in of cohesive ends as appropriate, alkaline phosphatase treatment to avoid undesirable joining, and enzymatic ligation. In another embodiment, the fusion gene can be synthesized by conventional techniques including automated DNA synthesizers. Alternatively, PCR amplification of gene fragments can be carried out using anchor primers which give rise to complementary overhangs between two consecutive gene fragments which can subsequently be annealed and reamplified to generate a chimeric gene sequence (see, for example, Current Protocols in Molecular Biology, eds. Ausubel et al. John Wiley & Sons: 1992). Moreover, many expression vectors are commercially available that already encode a fusion moiety (e.g., a GST polypeptide). A NIMR-encoding nucleic acid can be cloned into such an expression vector such that the fusion moiety is linked in-frame to the NIMR polypeptide.

[0151] The present invention also pertains to variants of the NIMR polypeptides which function as either NIMR agonists (mimetics) or as NIMR antagonists. Variants of the NIMR polypeptides can be generated by mutagenesis, e.g., discrete point mutation or truncation of an NIMR polypeptide. An agonist of the NIMR polypeptides can retain substantially the same, or a subset, of the biological activities of the naturally occurring form of an NIMR polypeptide. An antagonist of an NIMR polypeptide can inhibit one or more of the activities of the naturally occurring form of the NIMR polypeptide by, for example, competitively modulating a cellular activity of an NIMR polypeptide. Thus, specific biological effects can be elicited by treatment with a variant of limited function. In one embodiment, treatment of a subject with a variant having a subset of the biological activities of the naturally occurring form of the polypeptide has fewer side effects in a subject relative to treatment with the naturally occurring form of the NIMR polypeptide.

[0152] In one embodiment, the invention pertains to derivatives of NIMR which may be formed by modifying at least one amino acid residue of NIMR by oxidation, reduction, or other derivatization processes known in the art.

[0153] In one embodiment, variants of an NIMR polypeptide which function as either NIMR agonists (mimetics) or as NIMR antagonists can be identified by screening combinatorial libraries of mutants, e.g., truncation mutants, of an NIMR polypeptide for NIMR polypeptide agonist or antagonist activity. In one embodiment, a variegated library of NIMR variants is generated by combinatorial mutagenesis at the nucleic acid level and is encoded by a variegated gene library. A variegated library of NIMR variants can be produced by, for example, enzymatically ligating a mixture of synthetic oligonucleotides into gene sequences such that a degenerate set of potential NIMR sequences is expressible as individual polypeptides, or alternatively, as a set of larger fusion polypeptides (e.g., for phage display) containing the set of NIMR sequences therein. There are a variety of methods which can be used to produce libraries of potential NIMR variants from a degenerate oligonucleotide sequence. Chemical synthesis of a degenerate gene sequence can be performed in an automatic DNA synthesizer, and the synthetic gene then ligated into an appropriate expression vector. Use of a degenerate set of genes allows for the provision, in one mixture, of all of the sequences encoding the desired set of potential NIMR sequences. Methods for synthesizing degenerate oligonucleotides are known in the art (see, e.g., Narang, S. A. (1983) Tetrahedron 39:3; Itakura et al. (1984) Annu. Rev. Biochem. 53:323; Itakura et al. (1984) Science 198:1056; Ike et al. (1983) Nucleic Acid Res. 11:477).

[0154] In one embodiment, a library of coding sequence fragments can be generated by treating a double stranded PCR fragment of an NIMR coding sequence with a nuclease under conditions wherein nicking occurs only about once per molecule, denaturing the double stranded DNA, renaturing the DNA to form double stranded DNA which can include sense/antisense pairs from different nicked products, removing single stranded portions from reformed duplexes by treatment with S1 nuclease, and ligating the resulting fragment library into an expression vector. By this method, an expression library can be derived which encodes N-terminal, C-terminal and internal fragments of various sizes of the NIMR polypeptide.

[0155] Several techniques are known in the art for screening gene products of combinatorial libraries made by point mutations or truncation, and for screening cDNA libraries for gene products having a selected property. Such techniques are adaptable for rapid screening of the gene libraries generated by the combinatorial mutagenesis of NIMR polypeptides. The most widely used techniques, which are amenable to high through-put analysis, for screening large gene libraries typically include cloning the gene library into replicable expression vectors, transforming appropriate cells with the resulting library of vectors, and expressing the combinatorial genes under conditions in which detection of a desired activity facilitates isolation of the vector encoding the gene whose product was detected. Recursive ensemble mutagenesis (REM), a technique which enhances the frequency of functional mutants in the libraries, can be used in combination with the screening assays to identify NIMR variants (Arkin and Yourvan (1992) Proc. Natl. Acad. Sci. USA 89:7811-7815; Delgrave et al. (1993) Protein Engineering 6(Cohen, S. P., Hachler, H. & Levy, S. B. (1993) J. Bacteriol. 175, 1484-1492):327-331).

[0156] In one embodiment, cell based assays can be exploited to analyze a variegated NIMR library. For example, a library of expression vectors can be transfected into a cell line which ordinarily synthesizes and secretes NIMR. The transfected cells are then cultured such that NIMR and a particular mutant NIMR are secreted and the effect of expression of the mutant on NIMR activity in cell supernatants can be detected, e.g., by any of a number of enzymatic assays. Plasmid DNA can then be recovered from the cells which score for inhibition, or alternatively, potentiation of NIMR activity, and the individual clones further characterized.

[0157] In addition to NIMR polypeptides comprising only naturally-occurring amino acids, NIMR peptidomimetics are also provided. Peptide analogs are commonly used in the pharmaceutical industry as non-peptide drugs with properties analogous to those of the template peptide. These types of non-peptide compound are termed “peptide mimetics” or “peptidomimetics” (Fauchere, J. (1986) Adv. Drug Res. 15: 29; Veber and Freidinger (1985) TINS p.392; and Evans et al. (1987) J. Med. Chem 30: 1229, which are incorporated herein by reference) and are usually developed with the aid of computerized molecular modeling.

[0158] Peptide mimetics that are structurally similar to therapeutically useful peptides may be used to produce an equivalent therapeutic or prophylactic effect. Generally, peptidomimetics are structurally similar to a paradigm polypeptide (i.e., a polypeptide that has a biological or pharmacological activity), such as NIMR, but have one or more peptide linkages optionally replaced by a linkage selected from the group consisting of: —CH2NH—, —CH2S—, —CH2-CH2-, —CH═CH— (cis and trans), —COCH2-, —CH(OH)CH2-, and —CH2SO—, by methods known in the art and further described in the following references: Spatola, A. F. in “Chemistry and Biochemistry of Amino Acids, Peptides, and Proteins,” B. Weinstein, eds., Marcel Dekker, New York, p. 267 (1983); Spatola, A. F., Vega Data (March 1983), Vol. 1, Issue 3, “Peptide Backbone Modifications” (general review); Morley, J. S., Trends Pharm Sci (1980) pp. 463-468 (general review); Hudson, D. et al., Int J Pept Prot Res (1979) 14:177-185 (—CH2NH—, CH2CH2-); Spatola, A. F. et al., Life Sci (1986) 38:1243-1249 (—CH2-S); Hann, M. M., J Chem Soc Perkin Trans 1 (1982) 307-314 (—CH—CH—, cis and trans); Almquist, R. G. et al., J Med Chem (1980) 23:1392-1398 (—COCH2-); Jennings-White, C. et al., Tetrahedron Lett (1982) 23:2533 (—COCH2-); Szelke, M. et al., European Appln. EP 45665 (1982) CA: 97:39405 (1982)(—CH(OH)CH2-); Holladay, M. W. et al., Tetrahedron Lett (1983) 24:4401-4404 (—C(OH)CH2-); and Hruby, V. J., Life Sci (1982) 31:189-199 (—CH2-S—); each of which is incorporated herein by reference. A particularly preferred non-peptide linkage is —CH2NH—.

[0159] Such peptide mimetics may have significant advantages over polypeptide embodiments, including, for example: more economical production, greater chemical stability, enhanced pharmacological properties (half-life, absorption, potency, efficacy, etc.), altered specificity (e.g., a broad-spectrum of biological activities), reduced antigenicity, and others. Labeling of peptidomimetics usually involves covalent attachment of one or more labels, directly or through a spacer (e.g., an amide group), to non-interfering position(s) on the peptidomimetic that are predicted by quantitative structure-activity data and/or molecular modeling. Such non-interfering positions generally, are positions that do not form direct contacts with the macromolecules(s) to which the peptidomimetic binds to produce the therapeutic effect. Derivitization (e.g., labelling) of peptidomimetics should not substantially interfere with the desired biological or pharmacological activity of the peptidomimetic.

[0160] Systematic substitution of one or more amino acids of an NIMR amino acid sequence with a D-amino acid of the same type (e.g., D-lysine in place of L-lysine) may be used to generate more stable peptides. In addition, constrained peptides comprising an NIMR amino acid sequence or a substantially identical sequence variation may be generated by methods known in the art (Rizo and Gierasch (1992) Ann. Rev. Biochem. 61: 387, incorporated herein by reference); for example, by adding internal cysteine residues capable of forming intramolecular disulfide bridges which cyclize the peptide.

[0161] The amino acid sequences of NIMR polypeptides identified herein will enable those of skill in the art to produce polypeptides corresponding to NIMR peptide sequences and sequence variants thereof. Such polypeptides may be produced in prokaryotic or eukaryotic host cells by expression of polynucleotides encoding an NIMR peptide sequence, frequently as part of a larger polypeptide. Alternatively, such peptides may be synthesized by chemical methods. Methods for expression of heterologous polypeptides in recombinant hosts, chemical synthesis of polypeptides, and in vitro translation are well known in the art and are described further in Maniatis et al., Molecular Cloning: A Laboratory Manual (1989), 2nd Ed., Cold Spring Harbor, N.Y.; Berger and Kimmel, Methods in Enzymology, Volume 152, Guide to Molecular Cloning Techniques (1987), Academic Press, Inc., San Diego, Calif.; Merrifield, J. (1969) J. Am. Chem. Soc. 91: 501; Chaiken I. M. (1981) CRC Crit. Rev. Biochem. 11: 255; Kaiser et al. (1989) Science 243: 187; Merrifield, B. (1986) Science 232: 342; Kent, S. B. H. (1988) Ann. Rev. Biochem. 57: 957; and Offord, R. E. (1980) Semisynthetic Proteins, Wiley Publishing, which are incorporated herein by reference).

[0162] Peptides can be produced, typically by direct chemical synthesis, and used e.g., as agonists or antagonists of an NIMR molecule, e.g., to modulate binding of an NIMR polypeptide and a molecule with which it normally interacts. Peptides can be produced as modified peptides, with nonpeptide moieties attached by covalent linkage to the N-terminus and/or C-terminus. In certain preferred embodiments, either the carboxy-terminus or the amino-terminus, or both, are chemically modified. The most common modifications of the terminal amino and carboxyl groups are acetylation and amidation, respectively. Amino-terminal modifications such as acylation (e.g., acetylation) or alkylation (e.g., methylation) and carboxy-terminal-modifications such as amidation, as well as other terminal modifications, including cyclization, may be incorporated into various embodiments of the invention. Certain amino-terminal and/or carboxy-terminal modifications and/or peptide extensions to the core sequence can provide advantageous physical, chemical, biochemical, and pharmacological properties, such as: enhanced stability, increased potency and/or efficacy, resistance to serum proteases, desirable pharmacokinetic properties, and others. Peptides may be used therapeutically, e.g, to treat infection.

[0163] An isolated NIMR polypeptide, or a portion or fragment thereof, can also be used as an immunogen to generate antibodies that bind NIMR using standard techniques for polyclonal and monoclonal antibody preparation. A full-length NIMR polypeptide can be used or, alternatively, the invention provides antigenic peptide fragments of NIMR for use as immunogens. The antigenic peptide of NIMR preferably comprises at least 8 amino acid residues and encompasses an epitope of NIMR such that an antibody raised against the peptide forms a specific immune complex with NIMR. More preferably, the antigenic peptide comprises at least 10 amino acid residues, even more preferably at least 15 amino acid residues, even more preferably at least 20 amino acid residues, and most preferably at least 30 amino acid residues.

[0164] Alternatively, an antigenic peptide fragment of an NIMR polypeptide can be used as the immunogen. An antigenic peptide fragment of an NIMR polypeptide typically comprises at least 8 amino acid residues of an amino acid sequence of an NIMR molecule of Table 1 and encompasses an epitope of an NIMR polypeptide such that an antibody raised against the peptide forms an immune complex with an NIMR molecule. Preferred epitopes encompassed by the antigenic peptide are regions of NIMR that are located on the surface of the polypeptide, e.g., hydrophilic regions. In one embodiment, an antibody binds substantially specifically to an NIMR polypeptide. In another embodiment, an antibody binds specifically to an NIMR polypeptide.

[0165] In one embodiment such epitopes can be specific for an NIMR polypeptide from one species (i.e., an antigenic peptide that spans a region of an NIMR polypeptide that is not conserved across species is used as immunogen; such non conserved residues can be determined using an alignment such as that provided herein). A standard hydrophobicity analysis of the polypeptide can be performed to identify hydrophilic regions.

[0166] Accordingly, another aspect of the invention pertains to the use of anti-NIMR antibodies. Polyclonal anti-NIMR antibodies can be prepared as described above by immunizing a suitable subject with an NIMR immunogen. The anti-NIMR antibody titer in the immunized subject can be monitored over time by standard techniques, such as with an enzyme linked immunosorbent assay (ELISA) using immobilized an NIMR polypeptide. If desired, the antibody molecules directed against an NIMR polypeptide can be isolated from the mammal (e.g., from the blood) and further purified by well known techniques, such as polypeptide A chromatography to obtain the IgG fraction. At an appropriate time after immunization, e.g., when the anti-NIMR antibody titers are highest, antibody-producing cells can be obtained from the subject and used to prepare monoclonal antibodies by standard techniques, such as the hybridoma technique originally described by Kohler and Milstein (1975, Nature 256:495-497) (see also, Brown et al. (1981) J Immunol 127:539-46; Brown et al. (1980) J Biol Chem 255:4980-83; Yeh et al. (1976) PNAS 76:2927-31; and Yeh et al. (1982) Int. J. Cancer 29:269-75), the more recent human B cell hybridoma technique (Kozbor et al. (1983) Immunol Today 4:72), the EBV-hybridoma. technique (Cole et al. (1985), Monoclonal Antibodies and Cancer Therapy, Alan R. Liss, Inc., pp. 77-96) or trioma techniques.

[0167] As an alternative to preparing monoclonal antibody-secreting hybridomas, a monoclonal anti-NIMR antibody can be identified and isolated by screening a recombinant combinatorial immunoglobulin library (e.g., an antibody phage display library) with an NIMR to thereby isolate immunoglobulin library members that bind an NIMR polypeptide. Kits for generating and screening phage display libraries are commercially available (e.g., the Pharmacia Recombinant Phage Antibody System, Catalog No. 27-9400-01; and the Stratagene SurfZAP™ Phage Display Kit, Catalog No. 240612). Additionally, examples of methods and reagents particularly amenable for use in generating and screening antibody display library can be found in, for example, Ladner et al. U.S. Pat. No. 5,223,409; Kang et al. International Publication No. WO 92/18619; Dower et al. International Publication No. WO 91/17271; Winter et al. International Publication WO 92/20791; Markland et al. International Publication No. WO 92/15679; Breitling et al. International Publication WO 93/01288; McCafferty et al. International Publication No. WO 92/01047; Garrard et al. International Publication No. WO 92/09690; Ladner et al. International Publication No. WO 90/02809; Fuchs et al. (1991) Bio/Technology 9:1370-1372; Hay et al. (1992) Hum Antibod Hybridomas 3:81-85; Huse et al. (1989) Science 246:1275-1281; Griffiths et al. (1993) EMBO J. 12:725-734; Hawkins et al. (1992) J Mol Biol 226:889-896; Clarkson et al. (1991) Nature 352:624-628; Gram et al. (1992) PNAS 89:3576-3580; Garrad et al. (1991) Bio/Technology 9:1373-1377; Hoogenboom et al. (1991) Nuc Acid Res 19:4133-4137; Barbas et al. (1991) PNAS 88:7978-7982; and McCafferty et al. Nature (1990) 348:552-554.

[0168] Additionally, recombinant anti-NIMR antibodies, such as chimeric and humanized monoclonal antibodies, comprising both human and non-human portions, which can be made using standard recombinant DNA techniques, are within the scope of the invention. Such chimeric and humanized monoclonal antibodies can be produced by recombinant DNA techniques known in the art, for example using methods described in Robinson et al. International Patent Publication PCT/US86/02269; Akira, et al European Patent Application 184, 187; Taniguchi, M., European Patent Application 171, 496; Morrison et al. European Patent Application 173, 494; Neuberger et al. PCT Application WO 86/01533; Cabilly et al. U.S. Pat. No. 4,816,567; Cabilly et al. European Patent Application 125, 023; Better et al. (1988) Science 240:1041-1043; Liu et al. (1987) PNAS 84:3439-3443; Liu et al. (1987) J. Immunol. 139:3521-3526; Sun et al. (1987) PNAS 84:214-218; Nishimura et al. (1987) Canc. Res. 47:999-1005; Wood et al. (1985) Nature 314:446-449; and Shaw et al. (1988) J. Natl Cancer Inst. 80:1553-1559); Morrison, S. L. (1985) Science 229:1202-1207; Oi et al. (1986) BioTechniques 4:214; Winter U.S. Pat. No. 5,225,539; Jones et al. (1986) Nature 321:552-525; Verhoeyan et al. (1988) Science 239:1534; and Beidler et al. (1988) J. Immunol. 141:4053-4060.

[0169] An anti-NIMR antibody (e.g., monoclonal antibody) can be used to isolate an NIMR polypeptide by standard techniques, such as affinity chromatography or immunoprecipitation. Anti-NIMR antibodies can facilitate the purification of natural NIMR polypeptides from cells and of recombinantly produced NIMR polypeptides expressed in host cells. Moreover, an anti-NIMR antibody can be used to detect an NIMR polypeptide (e.g., in a cellular lysate or cell supernatant). Detection may be facilitated by coupling (i.e., physically linking) the antibody to a detectable substance. Accordingly, in one embodiment, an anti-NIMR antibody of the invention is labeled with a detectable substance. Examples of detectable substances include various enzymes, prosthetic groups, fluorescent materials, luminescent materials and radioactive materials.

[0170] III. Microbes

[0171] Numerous different microbes are suitable for use as sources of NIMR nucleic acid molecules or polypeptides, as host cells, and in testing for compounds in the screening assays described herein, e.g., for testing for compounds that modulate the activity and/or expression of an NIMR polypeptides. The term “microbe” includes microorganisms having an NIMR polypeptide or those that can be engineered to express such a molecule for the purposes of developing a screening assay. Preferably “microbe” refers to unicellular prokaryotic or eukaryotic microbes including bacteria, fungi, or protozoa. In another embodiment, microbes suitable for use in the invention are multicellular, e.g., parasites or fungi. In preferred embodiments, microbes are pathogenic for humans, animals, or plants. In other embodiments, microbes causing environmental problems, e.g., fouling or spoilage or that perform useful functions such as breakdown of plant matter are also preferred. As such, any of these disclosed microbes may be used as intact cells or as sources of materials for cell-free assays as described herein.

[0172] In preferred embodiments, microbes for use in the claimed methods are bacteria, either Gram-negative or Gram-positive bacteria. In a preferred embodiment, any bacteria that are shown to become resistant to drugs, preferably antibiotics, are appropriate for use in the claimed methods.

[0173] In preferred embodiments, microbes are bacteria from the family Enterobacteriaceae. In more preferred embodiments bacteria of a genus selected from the group consisting of: Escherichia, Proteus, Salmonella, Klebsiella, Shigella, Providencia, Enterobacter, Burkholderia, Pseudomonas, Acinetobacter, Aeromonas, Haemophilus, Yersinia, Neisseria, and Erwinia, Rhodopseudomonas, or Burkholderia.

[0174] In yet other embodiments, the microbes are Gram-positive bacteria and are from a genus selected from the group consisting of: Lactobacillus, Azorhizobium, Streptomyces, Pediococcus, Photobacterium, Bacillus, Enterococcus, Staphylococcus, Clostridium, Streptococcus, Butyrivibrio, Sphingomonas, Rhodococcus, or Streptomyces

[0175] In yet other embodiments, the microbes are acid fast bacilli, e.g., from the genus Mycobacterium.

[0176] In still other embodiments, the microbes are, e.g., selected from a genus selected from the group consisting of: Methanobacterium, Sulfolobus, Archaeoglobu, Rhodobacter, or Sinorhizobium.

[0177] In other embodiments, the microbes are fungi. In a preferred embodiment the fungus is from the genus Mucor or Candida, e.g., Mucor racemosus or Candida albicans.

[0178] In yet other embodiments, the microbes are protozoa. In a preferred embodiment the microbe is a malaria or cryptosporidium parasite.

[0179] IV. Vectors and Host Cells

[0180] Preferred NIMR polypeptides for use in screening assays are “isolated” or recombinant polypeptides. In one embodiment, NIMR polypeptides can be made from isolated nucleic acid molecules. Nucleic acid molecules encoding NIMR polypeptides can be used for screening or can be used to produce NIMR polypeptides for use in the instant assays. For example, nucleic acid molecules encoding an NIMR polypeptide can be isolated (e.g., isolated from the sequences which naturally flank it in the chromosome and from cellular components) and can be used to produce an NIMR polypeptide. In one embodiment; a nucleic acid molecule which has been (George, A. M. & Levy, S. B. (1983) J. Bacteriol. 155, 541-548) amplified in vitro by, for example, polymerase chain reaction (PCR); (Cohen, S. P., Yan, W. & Levy, S. B. (1993) J. Infect. Dis. 168, 484-488) recombinantly produced by cloning, or (Cohen, S. P., Hachler, H. & Levy, S. B. (1993) J. Bacteriol. 175, 1484-1492) purified, as by cleavage and gel separation; or (Sulavick, M. C., Dazer, M. & Miller, P. F. (1997) J. Bacteriol. 179, 1857-1866) synthesized by, for example, chemical synthesis can be used to produce NIMR polypeptides.

[0181] NIMR polypeptides can be expressed in a modified form. For example, for secretion of the translated polypeptide into the lumen of the endoplasmic reticulum, into the periplasmic space or into the extracellular environment, appropriate secretion signals may be incorporated into the expressed polypeptide. These signals may be endogenous to the polypeptide or they may be heterologous signals. Polypeptides of the invention can be recovered and purified from recombinant cell cultures by well-known methods including ammonium sulfate or ethanol precipitation, acid extraction, anion or cation exchange chromatography, phosphocellulose chromatography, hydrophobic interaction chromatography, affinity chromatography, hydroxylapatite chromatography, and lectin chromatography. Most preferably, high performance liquid chromatography is employed for purification. Well known techniques for refolding proteins may be employed to regenerate active conformation when the polypeptide is denatured during isolation and or purification.

[0182] For recombinant production, host cells can be genetically engineered to incorporate nucleic acid molecules of the invention. In one embodiment nucleic acid molecules specifying NIMR polypeptides can be placed in a vector. The term “vector” refers to a nucleic acid molecule capable of transporting another nucleic acid molecule to which it has been linked. The term “expression vector” or “expression system” includes any vector, (e.g., a plasmid, cosmid or phage chromosome) containing a gene construct in a form suitable for expression by a cell (e.g., linked to a promoter). In the present specification, “plasmid” and “vector” are used interchangeably, as a plasmid is a commonly used form of vector. Moreover, the invention is intended to include other vectors which serve equivalent functions. A great variety of expression systems can be used to produce the polypeptides of the invention. Such vectors, include, among others, chromosomal, episomal and virus-derived vectors, e.g., vectors derived from bacterial plasmids, from bacteriophage, from transposons, from yeast episomes, from insertion elements, from yeast chromosomal elements, from viruses such as baculoviruses, papova viruses, such as SV40, vaccinia viruses, adenoviruses, fowl pox viruses, pseudorabies viruses and retroviruses, and vectors derived from combinations thereof, such as those derived from plasmid and bacteriophage genetic elements, such as cosmids and phagemids.

[0183] Appropriate vectors are widely available commercially and it is within the knowledge and discretion of one of ordinary skill in the art to choose a vector which is appropriate for use with a given host cell. The sequences encoding NIMR polypeptides can be introduced into a cell on a self-replicating vector or may be introduced into the chromosome of a microbe using homologous recombination or by an insertion element such as a transposon.

[0184] The expression system constructs may contain control regions that regulate expression. “Transcriptional regulatory sequence” is a generic term to refer to DNA sequences, such as initiation signals, enhancers, operators, and promoters, which induce or control transcription of polypeptide coding sequences with which they are operably linked. It will also be understood that a recombinant gene encoding an NIMR polypeptide can be under the control of transcriptional regulatory sequences which are the same or which are different from those sequences which control transcription of the naturally-occurring NIMR gene. Exemplary regulatory sequences are described in Goeddel; Gene Expression Technology: Methods in Enzymology 185, Academic Press, San Diego, Calif. (1990). For instance, any of a wide variety of expression control sequences, that control the expression of a DNA sequence when operatively linked to it, may be used in these vectors to express DNA sequences encoding the NIMR polypeptides of this invention.

[0185] Generally, any system or vector suitable to maintain, propagate or express nucleic acid molecules and/or to express a polypeptide in a host may be used for expression in this regard. The appropriate DNA sequence may be inserted into the expression system by any of a variety of well-known and routine techniques, such as, for example, those set forth in Sambrook et al., Molecular Cloning, A Laboratory Manual, (supra).

[0186] Exemplary expression vectors for expression of a gene encoding an NIMR polypeptide and capable of replication in a bacterium, e.g., a gram positive, gram negative, or in a cell of a simple eukaryotic fungus such as a Saccharomyces or, Pichia, or in a cell of a eukaryotic organism such as an insect, a bird, a mammal, or a plant, are known in the art. Such vectors may carry functional replication-specifying sequences (replicons) both for a host for expression, for example a Streptomyces, and for a host, for example, E. coli, for genetic manipulations and vector construction. See e.g. U.S. Pat. No. 4,745,056. Suitable vectors for a variety of organisms are described in Ausubel, F. et al., Short Protocols in Molecular Biology, Wiley, New York (1995), and for example, for Pichia, can be obtained from Invitrogen (Carlsbad, Calif.).

[0187] Useful expression control sequences, include, for example, the early and late promoters of SV40, adenovirus or cytomegalovirus immediate early promoter, the lac system, the trp system, the TAC or TRC system, T7 promoter whose expression is directed by T7 RNA polymerase, the major operator and promoter regions of phage lambda, the control regions for fd coat polypeptide, the promoter for 3-phosphoglycerate kinase or other glycolytic enzymes, the promoters of acid phosphatase, e.g., Pho5, the promoters of the yeast α-mating factors, the polyhedron promoter of the baculovirus system and other sequences known to control the expression of genes of prokaryotic or eukaryotic cells or their viruses, and various combinations thereof. A useful translational enhancer sequence is described in U.S. Pat. No. 4,820,639.

[0188] It should be understood that the design of the expression vector may depend on such factors as the choice of the host cell to be transformed and/or the type of polypeptide desired to be expressed. Representative examples of appropriate hosts include bacterial cells, such as gram positive, gram negative cells; fungal cells, such as yeast cells and Aspergillus cells; insect cells such as Drosophila S2 and Spodoplera Sf9 cells; animal cells such as CHO, COS, HeLa, C127, 3T3, BHK, 293 and Bowes melanoma cells; and plant cells.

[0189] In preferred embodiments, cells used to express NIMR polypeptides for purification or for use in screening assays, e.g., host cells, comprise a mutation which renders any endogenous NIMR polypeptide nonfunctional or causes the endogenous polypeptide to not be expressed. In other embodiments, mutations may also be made in other related genes of the host cell, such that there will be no interference from the endogenous host loci.

[0190] Introduction of a nucleic acid molecule into the host cell (“transformation”) can be effected by methods described in many standard laboratory manuals, such as Davis et al., Basic Methods In Molecular Biology, (1986) and Sambrook et al., Molecular Cloning: A Laboratory Manual, 2nd Ed., Cold Spring Harbor Laboratory Press, Cold Spring Harbor, N.Y. (1989). Examples include electroporation, phosphate transfection, DEAE-dextran mediated transfection, transvection, microinjection, cationic lipid-mediated transfection, electroporation, transduction, scrape loading, ballistic introduction and infection.

[0191] Purification of an NIMR polypeptides, e.g., recombinantly expressed polypeptides, can be accomplished using techniques known in the art. For example, if the NIMR polypeptide is expressed in a form that is secreted from cells, the medium can be collected. Alternatively, if the NIMR polypeptide is expressed in a form that is retained by cells, the host cells can be lysed to release the NIMR polypeptide. Such spent medium or cell lysate can be used to concentrate and purify the NIMR polypeptide. For example, the medium or lysate can be passed over a column, e.g., a column to which antibodies specific for the NIMR polypeptide have been bound. Alternatively, such antibodies can be specific for a non-NIMR polypeptide which has been fused to the NIMR polypeptide (e.g., as a tag) to facilitate purification of the NIMR polypeptide. Other means of purifying NIMR polypeptides are known in the art.

[0192] V. Uses of NIMR Compositions

[0193] The NIMR modulating agents (e.g., nucleic acid molecules, polypeptides, variants, polypeptide homologues, NIMR agonists or antagonists, and antibodies described herein) can be used in one or more of the following methods: a) methods of treatment, e.g., a) treatment of infection and disinfection of surfaces; b) screening assays; c) use in vaccines, d) diagnostic assays, and the like. The isolated nucleic acid molecules of the invention can be used, for example, to express NIMR polypeptide (e.g., in a host cell in gene therapy applications), to detect NIMR mRNA (e.g., in a biological sample) or a genetic alteration in an NIMR gene, and to modulate NIMR activity, as described further below. In addition, the NIMR polypeptides can be used, e.g., to screen for naturally occurring NIMR binding polypeptides, to screen for drugs or compounds which modulate NIMR activity (e.g., are agonists or antagonists of NIMR activity), as well as to treat disorders that would benefit from modulation of NIMR, e.g., infection with a microbe. The NIMR modulating agents can be used to treat infection (e.g., alone or in combination with a second drug, e.g., an antibiotic) or to reduce contamination (e.g., alone or in combination with a non-antibiotic agent). NIMR modulating agents can also be used to alter MarA regulation of NIMR genes. For example, such agents can be used to downregulate genes that are normally upregulated by MarA or to upregulate genes that are normally downregulated by MarA. Moreover, the anti-NIMR antibodies of the invention can be used to modulate NIMR activity and to detect and isolate NIMR polypeptides, regulate the bioavailability of NIMR polypeptides, and modulate NIMR activity.

[0194] A. Methods of Treatment

[0195] The subject compositions can be used in treating disorders that would benefit from modulation of an NIMR polypeptide activity, e.g., in treating a subject having an infection with a microbe.

[0196] As used herein the term “infection” includes the presence of a microbe in or on a subject which, if its growth were inhibited, would result in a benefit to the subject. As such, the term “infection” in addition to referring to the presence of pathogens also includes normal flora which is not desirable, e.g., on the skin of a burn patient or in the gastrointestinal tract of an immunocompromised patient. As used herein, the term “treating” refers to the administration of a compound to a subject, for prophylactic and/or therapeutic purposes. The term “administration” includes delivery to a subject, e.g., by any appropriate method which serves to deliver the drug to the site of the infection. Administration of the drug can be, e.g., oral, intravenous, or topical (as described in further detail below). Drugs can also be contacted with microbes that are not present in the body, but are present in the environment, e.g., on surfaces.

[0197] Methods of modulating expression and/or activity of an NIMR polypeptide in a microbial cell are useful in modulation, e.g., of microbial adapatation to environmental stress and/or moduation of microbial virulence. Generally, it is desirable to increase expression and/or activity of those genes that are downmodulated by overexpression of MarA and to decrease the expression and/or activity of those genes that are upmodulated by overexpression of MarA.

[0198] Exemplary NIMR downmodulatory agents include: antisense NIMR nucleic acid molecules, anti-NIMR antibodies, dominant negative NIMR mutants, NIMR antagonists, or compounds which downmodulate NIMR activity identified using the subject screening assays. Additionally or alternatively, compounds which downmodulate NIMR activity can be designed using approaches known in the art.

[0199] Exemplary NIMR stimulatory agents include active NIMR polypeptide molecules and nucleic acid molecules encoding NIMR that are introduced into a cell to increase NIMR activity in the cell.

[0200] The modulatory methods of the invention can be performed in vitro or in vivo.

[0201] NIMR modulating agents can be used alone, in combination with other NIMR modulating agents (e.g., that modulate the same or a different NIMR molecule), or with other drugs (e.g., antibiotic or non-antibiotic drugs).

[0202] In one embodiment, an NIMR modulating agent can be administered to a subject alone, e.g., prior to administration of an antibiotic agent in order to increase the efficacy of the antibiotic. In one embodiment, an NIMR modulating agent can be administered to a subject in combination with an antibiotic agent in order to increase the efficacy of the antibiotic.

[0203] In another embodiment, an NIMR modulating agent or agents can be used to disinfect surfaces, e.g., in combination with a non-antibiotic agent such as a biocide, in order to increase the effectiveness of the non-antibiotic agent.

[0204] In one embodiment, a “combination product” can be formulated comprising an NIMR modulating agent and a non-antibiotic agent, e.g., a disinfectant for decontamination of surfaces or a consumer product (e.g., a detergent, soap, deodorant, mouthwash, toothpaste, or lotion).

[0205] B. Uses in Identifying NIMR Agonists and Antagonists

[0206] The invention provides a method (also referred to herein as a “screening assay”) to identify those which modulate (enhance (agonists) or block (antagonists)) the action of NIMR polypeptides or nucleic acid molecules, particularly those compounds that are bacteriostatic and/or bactericidal or prevent the infectious process. The subject screening assays can be used to identify modulators, i.e., candidate or test compounds or agents (e.g., peptides, peptidomimetics, small molecules or other drugs) which modulate NIMR polypeptides, i.e., have a stimulatory or inhibitory effect on, for example, NIMR polypeptide expression or NIMR polypeptide activity. Test compounds may be natural substrates and ligands or may be structural or functional mimetics. See, e.g., Coligan et al., Current Protocols in Immunology 1(2): Chapter 5 (1991).

[0207] NIMR polypeptide agonists and antagonists can be assayed in a variety of ways. For example, in one embodiment, the invention provides for methods for identifying a compound which modulates an NIMR molecule, e.g., by measuring the ability of the compound to interact with an NIMR nucleic acid molecule or an NIMR polypeptide or the ability of a compound to modulate the activity or expression of an NIMR polypeptide. Furthermore, the ability of a compound to modulate the binding of an NIMR polypeptide or NIMR nucleic acid molecule to a molecule to which they normally bind, e.g., an NIMR binding polypeptide can be tested.

[0208] Compounds for testing in the instant methods can be derived from a variety of different sources and can be known or can be novel. Preferably, a screening assay is performed to test the activity of a compound not previously known to have the activity tested for. Each of the NIMR sequences provided herein may be used in the discovery and development of antibacterial compounds. The NIMR polypeptide or portions thereof, upon expression, can be used as a target for the screening of antibacterial drugs. In another embodiment, antisense nucleic acid molecules or nucleic acid molecules that encode for dominant negative NIMR mutants can also be tested in the subject assays.

[0209] In one embodiment, libraries of compounds are tested in the instant methods. In another embodiment, known compounds are tested in the instant methods. In another embodiment, compounds among the list of compounds generally regarded as safe (GRAS) by the Environmental Protection Agency are tested in the instant methods.

[0210] In one embodiment, a library of compounds can be screened in the subject assays. A recent trend in medicinal chemistry includes the production of mixtures of compounds, referred to as libraries. While the use of libraries of peptides is well established in the art, new techniques have been developed which have allowed the production of mixtures of other compounds, such as benzodiazepines (Bunin et al. 1992. J. Am. Chem. Soc. 114:10987; DeWitt et al. 1993. Proc. Natl. Acad. Sci. USA 90:6909) peptoids (Zuckermann. 1994. J. Med Chem. 37:2678) oligocarbamates (Cho et al. 1993. Science. 261:1303), and hydantoins (DeWitt et al. supra). Rebek et al. have described an approach for the synthesis of molecular libraries of small organic molecules with a diversity of 10⁴-10⁵ (Carell et al. 1994. Angew. Chem. Int. Ed. Engl. 33:2059; Carell et al. Angew. Chem. Int. Ed. Engl. 1994. 33:2061).

[0211] The compounds for screening in the assays of the present invention can be obtained using any of the numerous approaches in combinatorial library methods known in the art, including: biological libraries; spatially addressable parallel solid phase or solution phase libraries, synthetic library methods requiring deconvolution, the “one-bead one-compound” library method, and synthetic library methods using affinity chromatography selection. The biological library approach is limited to peptide libraries, while the other four approaches are applicable to peptide, non-peptide oligomer or small molecule libraries of compounds (Lam, K. S. Anticancer Drug Des. 1997. 12:145).

[0212] Exemplary compounds which can be screened for activity include, but are not limited to, peptides, nucleic acids, carbohydrates, small organic molecules (e.g., polyketides) (Cane et al. 1998. Science 282:63), and natural product extract libraries. In one embodiment, the test compound is a peptide or peptidomimetic. In another, preferred embodiment, the compounds are small, organic non-peptidic compounds.

[0213] Other exemplary methods for the synthesis of molecular libraries can be found in the art, for example in: Erb et al. 1994. Proc. Natl. Acad. Sci. USA 91:11422; Horwell et al. 1996 Immunopharmacology 33:68; and in Gallop et al. 1994. J. Med. Chem. 37:1233. Libraries of compounds may be presented in solution (e.g., Houghten (1992) Biotechniques 13:412-421), or on beads (Lam (1991) Nature 354:82-84), chips (Fodor (1993) Nature 364:555-556), bacteria (Ladner U.S. Pat. No. 5,223,409), spores (Ladner U.S. Pat. No. '409), plasmids (Cull et al. (1992) Proc. Natl. Acad. Sci. USA 89:1865-1869) or on phage (Scott and Smith (1990) Science 249:386-390); (Devlin (1990) Science 249:404-406); (Cwirla et al. (1990) Proc. Natl. Acad. Sci. 87:6378-6382); (Felici (1991) J. Mol. Biol. 222:301-310); (Ladner supra). Other types of peptide libraries may also be expressed, see, for example, U.S. Pat. Nos. 5,270,181 and 5,292,646). In still another embodiment, combinatorial polypeptides can be produced from a cDNA library.

[0214] The efficacy of the agonist or antagonist can be assessed by generating dose response curves from data obtained using various concentrations of the test modulating agent. Moreover, a control assay can also be performed to provide a baseline for comparison. As described in more detail below, either whole cell or cell free assay systems can be employed.

[0215] 1. Whole Cell Assays

[0216] In one embodiment of the invention, the subject screening assays can be performed using whole cells. In one embodiment of the invention, the step of determining whether a compound reduces the activity or expression of an NIMR polypeptide comprises contacting a cell expressing an NIMR polypeptide with a compound and measuring the ability of the compound to modulate the activity or expression of an NIMR polypeptide.

[0217] In another embodiment, modulators of NIMR polypeptide expression are identified in a method wherein a cell is contacted with a candidate compound and the expression of NIMR polypeptide mRNA or protein in the cell is determined. The level of expression of NIMR polypeptide mRNA or protein in the presence of the candidate compound is compared to the level of expression of NIMR polypeptide mRNA or polypeptide in the absence of the candidate compound. The candidate compound can then be identified as a modulator of NIMR polypeptide expression based on this comparison. For example, when expression of NIMR polypeptide mRNA or protein is greater (e.g., statistically significantly greater) in the presence of the candidate compound than in its absence, the candidate compound is identified as a stimulator of NIMR polypeptide mRNA or protein expression. Alternatively, when expression of NIMR polypeptide mRNA or protein is less (e.g., statistically significantly less) in the presence of the candidate compound than in its absence, the candidate compound is identified as an inhibitor of NIMR mRNA or protein expression. The level of NIMR mRNA or protein expression in the cells can be determined by methods described herein for detecting NIMR mRNA or protein.

[0218] To measure expression of an NIMR polypeptide, transcription of an NIMR nucleic acid molecule gene can be measured in control cells which have not been treated with the compound and compared with that of test cells which have been treated with the compound. For example, cells which express endogenous NIMR polypeptides or which are engineered to express or overexpress recombinant NIMR polypeptides can be caused to express or overexpress a recombinant NIMR polypeptide in the presence and absence of a test modulating agent of interest, with the assay scoring for modulation in NIMR polypeptide responses by the target cell mediated by the test agent. For example, as with the cell-free assays, modulating agents which produce a change, e.g., a statistically significant change in NIMR polypeptide-dependent responses (either an increase or decrease) can be identified.

[0219] Recombinant expression vectors that can be used for expression of NIMR polypeptide are known in the art (see discussions above). In one embodiment, within the expression vector the NIMR polypeptide-coding sequences are operatively linked to regulatory sequences that allow for constitutive or inducible expression of NIMR polypeptide in the indicator cell(s). Use of a recombinant expression vector that allows for constitutive or inducible expression of NIMR polypeptide in a cell is preferred for identification of compounds that enhance or inhibit the activity of NIMR polypeptide. In an alternative embodiment, within the expression vector the NIMR polypeptide coding sequences are operatively linked to regulatory sequences of the endogenous NIMR polypeptide gene (i.e., the promoter regulatory region derived from the endogenous gene). Use of a recombinant expression vector in which NIMR polypeptide expression is controlled by the endogenous regulatory sequences is preferred for identification of compounds that enhance or inhibit the transcriptional expression of NIMR polypeptide.

[0220] In one embodiment, the level of transcription can be determined by measuring the amount of RNA produced by the cell. For example, the RNA can be isolated from cells which express an NIMR polypeptide and that have been incubated in the presence or absence of compound. Northern blots using probes specific for the sequences to be detected can then be performed using techniques known in the art. Numerous other, art-recognized techniques can be used. For example, western blot analysis can be used to test for NIMR. For example, in another embodiment, transcription of specific RNA molecules can be detected using the polymerase chain reaction, for example by making cDNA copies of the RNA transcript to be measured and amplifying and measuring them. In another embodiment, RNAse protection assays, such as S1 nuclease mapping or RNase mapping can be used to detect the level of transcription of a gene. In another embodiment, primer extension can be used.

[0221] In yet other embodiments, the ability of a compound to induce a change in transcription or translation of an NIMR polypeptide can be accomplished by measuring the amount of NIMR polypeptide produced by the cell. Polypeptides which can be detected include any polypeptides which are produced upon the activation of an NIMR responsive promoter, including, for example, both endogenous sequences and reporter gene sequences. In one embodiment, the amount of polypeptide made by a cell can be detected using an antibody against that polypeptide. In other embodiments, the activity of such a polypeptide can be measured.

[0222] In one embodiment, other sequences which are regulated by an NIMR promoter (e.g., a promoter having sequence identity with a promoter that regulates expression of an NIMR gene set forth in Table 1) can be detected. In one embodiment, sequences not normally regulated by an NIMR promoter can be assayed by linking them to a promoter that regulates transcription of an NIMR polypeptide.

[0223] In preferred embodiments, to provide a convenient readout of the transcription from an NIMR promoter, such a promoter is linked to a reporter gene, the transcription of which is readily detectable. For example, a bacterial cell, e.g., an E. coli cell, can be transformed as taught in Cohen et al. 1993. J. Bacteriol. 175:7856.

[0224] Examples of reporter genes include, but are not limited to, CAT (chloramphenicol acetyl transferase) (Alton and Vapnek (1979), Nature 282: 864-869) luciferase, and other enzyme detection systems, such as beta-galactosidase; firefly luciferase (de Wet et al. (1987), Mol. Cell. Biol. 7:725-737); bacterial luciferase (Engebrecht and Silverman (1984), PNAS 1: 4154-4158; Baldwin et al. (1984), Biochemistry 23: 3663-3667); PhoA, alkaline phosphatase (Toh et al. (1989) Eur. J. Biochem. 182: 231-238, Hall et al. (1983) J. Mol. Appl. Gen. 2: 101), human placental secreted alkaline phosphatase (Cullen and Malim (1992) Methods in Enzymol. 216:362-368) and green fluorescent polypeptide (U.S. Pat. No. 5,491,084; WO96/23898).

[0225] In yet another embodiment, the ability of a compound to modulate an NIMR polypeptide activity, (e,g., to modulate microbial responses to environmental stress and, thereby, modulate microbial adaptation to stress and/or microbial virulence) can be tested by measuring the ability of the compound to affect the ability of a microbe to adapt to a drug, e.g. by testing the ability of the microbe to grow in the presence of the drug. For example, the ability of a test compound to modulate the minimal inhibitory concentration (MIC) of the indicator compound can be tested. Such an assay can be performed using a standard methods, e.g., an antibiotic disc assay or an automated growth assay, e.g., using a system such as one commercially available from Viteck. In one embodiment, the method comprises detecting the ability of the compound to modulate growth of a microbe in the presence of one or more non-antibiotic agents. In another embodiment, the method comprises detecting the ability of the compound to modulate growth of a microbe in the presence of one or more antibiotics.

[0226] In another embodiment, the ability of a test compound to modulate the efflux of a drug from the cell can be tested. In this method, microbes are contacted with a test compound with or without an indicator compound (an indicator compound is one which is normally exported by the cell). The ability of a test compound to inhibit the activity of an efflux pump is demonstrated by determining whether the intracellular concentration of the test compound or the indicator compound (e.g., a drug or a dye) is elevated in the presence of the test compound. If the intracellular concentration of the indicator compound is increased in the presence of the test compound as compared to the intracellular concentration in the absence of the test compound, then the test compound can be identified as an inhibitor of an efflux pump. Thus, one can determine whether or not the test compound is an inhibitor of an efflux pump by showing that the test compound affects the ability of an efflux pump present in the microbe to export the indicator compound.

[0227] The “intracellular concentration” of an indicator compound includes the concentration of the indicator compound inside the outermost membrane of the microbe. The outermost membrane of the microbe can be, e.g., a cytoplasmic membrane. In the case of Gram-negative bacteria, the relevant “intracellular concentration” is the concentration in the cellular space in which the indicator compound localizes, e.g., the cellular space which contains a target of the indicator compound.

[0228] In one embodiment, the method comprises detecting the ability of the compound to reduce antibiotic resistance in a microbe. For example, in one embodiment, the indicator compound comprises an antibiotic and the effect of the test compound on the intracellular concentration of antibiotic in the microbe is measured. In one embodiment, an increase in the intracellular concentration of antibiotic can be measured directly, e.g., in an extract of microbial cells. For example, accumulation of a radiolabelled antibiotic can be determined using standard techniques. For instance, microbes can be contacted with a radiolabelled antibiotic as an indicator composition in the presence and absence of a test compound. The concentration of the antibiotic inside the cells can be measured at equilibrium by harvesting cells from the two groups (with and without test compound) and cell associated radioactivity measured with a liquid scintillation counter. In another embodiment, an increase in the intracellular concentration of antibiotic can be measured indirectly, e.g., by a showing that a given concentration of antibiotic when contacted with the microbe is sufficient to inhibit the growth of the microbe in the presence of the test compound, but not in the absence of the test compound.

[0229] In another embodiment, measurement of the intracellular concentration of an indicator compound can be facilitated by using an indicator compound which is readily detectable by spectroscopic means. Such a compound may be, for example, a dye, e.g., a basic dye, or a fluorophore. Exemplary indicator compounds include: acridine, ethidium bromode, gentian violet, malachite green, methylene blue, beenzyn viologen, bromothymol blue, toluidine blue, methylene blue rose bengal, alcyan blue, ruthenium red, fast green, aniline blue, xylene cyanol, bromophenol blue, coomassie blue, bormocresol purple, bromocresol green, trypan blue, and phenol red.

[0230] In such an assay, the effect of the test compound on the ability of the cell to export the indicator compound can be measured spectroscopically. For example, the intracellular concentration of the dye or fluorophore can be determined indirectly, by determining the concentration of the indicator compound in the suspension medium or by determining the concentration of the indicator compound in the cells. This can be done, e.g., by extracting the indicator compound from the cells or by visual inspection of the cells themselves.

[0231] In another embodiment, the presence of an indicator compound in a microbe can be detected using a reporter gene which is sensitive to the presence of the indicator compound. Exemplary reporter genes are known in the art. For example, a reporter gene can provide a colorometric read out or an enzymatic read out of the presence of an indicator compound. In yet another embodiment, a reporter gene whose expression is inducible by the presence of a drug in a microbe can be used. For example, a microbe can be grown in the presence of a drug with and without a putative test compound. In cells in which the efflux pump is inhibited, the concentration of the drug will be increased and the reporter gene construct will be expressed. By this method, efflux pump inhibitors are identified by their ability to inhibit the export rate of the drug and, thus, to induce reporter gene expression.

[0232] In another embodiment, a primary screening assay is used in which an indicator compound which does not comprise an antibiotic is employed. In one embodiment, upon the identification of a test compound that increases the intracellular concentration of the test compound, a secondary screening assay is performed in which the effect of the same test compound on susceptibility to the drug of interest, e.g., antibiotic resistance, is measured.

[0233] In yet another embodiment, the ability of a compound to modulate the binding of an NIMR polypeptide to an NIMR binding polypeptide can be determined. NIMR binding polypeptides can be identified using techniques which are known in the art. For example, in the case of binding polypeptides that interact with NIMR polypeptides, interaction trap assays or two hybrid screening assays can be used.

[0234] NIMR binding polypeptides can be identified e.g., e.g., by using an NIMR polypeptides or portions thereof of the invention as a “bait proteins” in a two-hybrid assay or three-hybrid assay (see, e.g., U.S. Pat. No. 5,283,317; Zervos et al. (1993) Cell 72:223-232; Madura et al. (1993) J. Biol. Chem. 268:12046-12054; Bartel et al. (1993) Biotechniques 14:920-924; Iwabuchi et al. (1993) Oncogene 8:1693-1696; and Brent WO94/10300), to identify other proteins, which bind to or interact with NIMR polypeptides (“NIMR-binding polypeptides”) and are involved in NIMR activity. Such NIMR family-binding polypeptides are also likely to be involved in the propagation of signals by the NIMR polypeptides or to associate with NIMR polypeptides and enhance or inhibit their activity.

[0235] The two-hybrid system is based on the modular nature of most transcription factors, which consist of separable DNA-binding and activation domains. Briefly, the assay utilizes two different DNA constructs. In one construct, the gene that codes for an NIMR polypeptide is fused to a gene encoding the DNA binding domain of a known transcription factor (e.g., GAL-4). In the other construct, a DNA sequence, from a library of DNA sequences, that encodes an unidentified protein (“prey” or “sample”) is fused to a gene that codes for the activation domain of the known transcription factor. If the “bait” and the “prey” proteins are able to interact, in vivo, forming an NIMR polypeptide-dependent complex, the DNA-binding and activation domains of the transcription factor are brought into close proximity. This proximity allows transcription of a reporter gene (e.g., LacZ) which is operably linked to a transcriptional regulatory site responsive to the transcription factor. Expression of the reporter gene can be detected and cell colonies containing the functional transcription factor can be isolated and used to obtain the cloned gene which encodes the polypeptide which interacts with the NIMR polypeptide.

[0236] NIMR binding polypeptides may also be identified in other ways. For example, a library of molecules can be tested for the presence of NIMR binding polypeptides. In one embodiment, the library of molecules can be tested by expressing them in an expression vector, e.g., a bacteriophage. Bacteriophage can be made to display on their surface a plurality of polypeptide sequences, each polypeptide sequence being encoded by a nucleic acid contained within the bacteriophage. The phage expressing these candidate NIMR binding polypeptides can be tested for the ability to bind an immobilized NIMR polypeptide, to obtain those polypeptides having affinity for the NIMR polypeptide. For example, the method can comprise: contacting the immobilized NIMR polypeptide with a sample of the library of bacteriophage so that the NIMR polypeptide can interact with the different polypeptide sequences and bind those having affinity for the NIMR polypeptide to form a set of complexes consisting of immobilized NIMR polypeptide and bound bacteriophage. The complexes which have not formed a complex can be separated. The complexes of NIMR polypeptide and bound bacteriophage can be contacted with an agent that dissociates the bound bacteriophage from the complexes; and the dissociated bacteriophage can be isolated and the sequence of the nucleic acid molecule encoding the displayed polypeptide obtained, so that amino acid sequences of displayed polypeptides with affinity for NIMR polypeptides are obtained.

[0237] In the case of NIMR nucleic acid molecules, NIMR binding polypeptides can be identified, e.g., by contacting an NIMR nucleotide sequence with candidate NIMR binding polypeptides (e.g., in the form of microbial extract) under conditions which allow interaction of components of the extract with the NIMR nucleotide sequence. The ability of the NIMR nucleotide sequence to interact with the components can then be measured to thereby identify a polypeptide that binds to an NIMR nucleotide sequence.

[0238] 2. Cell-Free Assays

[0239] The subject screening methods can involve cell-free assays, e.g., using high-throughput techniques. For example, to screen for agonists or antagonists, a synthetic reaction mix comprising an NIMR molecule and a labeled substrate or ligand of such polypeptide is incubated in the absence or the presence of a candidate molecule that may be an agonist or antagonist. In one embodiment, the reaction mix can further comprise a cellular compartment, such as a membrane, cell envelope or cell wall, or a combination thereof. The ability of the test compound to agonize or antagonize the NIMR polypeptide is reflected in decreased binding of the NIMR polypeptide to an NIMR binding polypeptide or in a decrease in NIMR polypeptide activity.

[0240] In many drug screening programs which test libraries of modulating agents and natural extracts, high throughput assays are desirable in order to maximize the number of modulating agents surveyed in a given period of time. Assays which are performed in cell-free systems, such as may be derived with purified or semi-purified proteins, are often preferred as “primary” screens in that they can be generated to permit rapid development and relatively easy detection of an alteration in a molecular target which is mediated by a test modulating agent. Moreover, the effects of cellular toxicity and/or bioavailability of the test modulating agent can be generally ignored in the in vitro system.

[0241] In one embodiment, the ability of a compound to modulate the activity of an NIMR polypeptide is accomplished using isolated NIMR polypeptides or NIMR nucleic acid molecule in a cell-free system. In such an assay, the step of measuring the ability of a compound to modulate the activity of the NIMR polypeptide is accomplished, for example, by measuring direct binding of the compound to an NIMR polypeptide or NIMR nucleic acid molecule or the ability of the compound to alter the ability of the NIMR polypeptide to bind to a molecule to which the NIMR polypeptide normally binds (e.g., protein or DNA).

[0242] In yet another embodiment, an assay of the present invention is a cell-free assay in which an NIMR polypeptide or portion thereof is contacted with a test compound and the ability of the test compound to bind to the NIMR polypeptide or biologically active portion thereof is determined. Determining the ability of the test compound to modulate the activity of an NIMR polypeptide can be accomplished, for example, by determining the ability of the NIMR polypeptide to bind to an NIMR target molecule by one of the methods described above for determining direct binding. Determining the ability of the NIMR polypeptide to bind to an NIMR target molecule can also be accomplished using a technology such as real-time Biomolecular Interaction Analysis (BIA). Sjolander, S. and Urbaniczky, C. (1991) Anal. Chem. 63:2338-2345 and Szabo et al. (1995) Curr. Opin. Struct. Biol. 5:699-705. As used herein, “BIA” is a technology for studying biospecific interactions in real time, without labeling any of the interactants (e.g., BIAcore). Changes in the optical phenomenon of surface plasmon resonance (SPR) can be used as an indication of real-time reactions between biological molecules.

[0243] In yet another embodiment, the cell-free assay involves contacting an NIMR polypeptide or biologically active portion thereof with a known compound which binds the NIMR polypeptide to form an assay mixture, contacting the assay mixture with a test compound, and determining the ability of the test compound to interact with the NIMR polypeptide, wherein determining the ability of the test compound to interact with the NIMR polypeptide comprises determining the ability of the NIMR polypeptide to preferentially bind to or modulate the activity of an NIMR target molecule.

[0244] The cell-free assays of the present invention are amenable to use of both soluble and/or membrane-bound forms of proteins (e.g., NIMR polypeptides or NIMR binding polypeptides). In the case of cell-free assays in which a membrane-bound form of a polypeptide is used it may be desirable to utilize a solubilizing agent such that the membrane-bound form of the polypeptide is maintained in solution. Examples of such solubilizing agents include non-ionic detergents such as n-octylglucoside, n-dodecylglucoside, n-dodecylmaltoside, octanoyl-N-methylglucamide, decanoyl-N-methylglucamide, Triton® X-100, Triton® X-114, Thesit®, Isotridecypoly(ethylene glycol ether)ₙ, 3-[(3-cholamidopropyl)dimethylamminio]-1-propane sulfonate (CHAPS), 3-[(3-cholamidopropyl)dimethylamminio]-2-hydroxy-1-propane sulfonate (CHAPSO), or N-dodecyl=N,N-dimethyl-3-ammonio-1-propane sulfonate.

[0245] For example, compounds can be tested for their ability to directly bind to an NIMR nucleic acid molecule or an NIMR polypeptide or portion thereof, e.g., by using labeled compounds, e.g., radioactively labeled compounds. For example, an NIMR polypeptide sequence can be expressed by a bacteriophage. In this embodiment, phage which display the NIMR polypeptide would then be contacted with a compound so that the polypeptide can interact with and potentially form a complex with the compound. Phage which have formed complexes with compounds can then be separated from those which have not. The complex of the polypeptide and compound can then be contacted with an agent that dissociates the bacteriophage from the compound. Any compounds that bound to the polypeptide can then be isolated and identified.

[0246] In another embodiment, the ability of a compound to bind to an NIMR nucleic acid molecule can be measured. For example, gel shift assays or restriction enzyme protection assays can be used. Gel shift assays separate polypeptide-DNA complexes from free DNA by non-denaturing polyacrylamide gel electrophoresis. In such an experiment, the level of binding of a compound to DNA can be determined and compared to that in the absence of compound. Compounds which change the level of this binding are selected in the screen as modulating the activity of an NIMR polypeptide.

[0247] Other methods of assaying the ability of proteins to bind to DNA, e.g., DNA footprinting, and nuclease protection are also well known in the art and can be used to test the ability of a compound to bind to an NIMR nucleotide sequence.

[0248] In another embodiment, the invention provides a method for identifying compounds that modulate antibiotic resistance by assaying for test compounds that bind to NIMR nucleic acid molecules and interfere, e.g., with gene transcription.

[0249] In another embodiment, an NIMR nucleic acid molecule and an NIMR binding polypeptide that normally binds to that nucleotide sequence are contacted with a test compound to identify compounds that block the interaction of an NIMR nucleic acid molecule and an NIMR binding polypeptide. For example, in one embodiment, the NIMR nucleotide sequence and/or the NIMR binding polypeptide are contacted under conditions which allow interaction of the compound with at least one of the NIMR nucleic acid molecule and the NIMR binding polypeptide. The ability of the compound to modulate the interaction of the NIMR nucleotide sequence with the NIMR binding polypeptide is indicative of its ability to modulate an NIMR polypeptide activity.

[0250] Determining the ability of the NIMR polypeptide to bind to or interact with an NIMR binding polypeptide can be accomplished, e.g., by direct binding. In a direct binding assay, the NIMR polypeptide could be coupled with a radioisotope or enzymatic label such that binding of the NIMR polypeptide to an NIMR polypeptide target molecule can be determined by detecting the labeled NIMR polypeptide in a complex. For example NIMR polypeptides can be labeled with ¹²⁵I, ³⁵S, ¹⁴C, or ³H, either directly or indirectly, and the radioisotope detected by direct counting of radioemmission or by scintillation counting. Alternatively, NIMR polypeptide molecules can be enzymatically labeled with, for example, horseradish peroxidase, alkaline phosphatase, or luciferase, and the enzymatic label detected by determination of conversion of an appropriate substrate to product.

[0251] Typically, it will be desirable to immobilize either NIMR polypeptide, an NIMR binding polypeptide or a compound to facilitate separation of complexes from uncomplexed forms, as well as to accommodate automation of the assay. Binding of NIMR polypeptide to an upstream or downstream binding polypeptide, in the presence and absence of a candidate agent, can be accomplished in any vessel suitable for containing the reactants. Examples include microtitre plates, test tubes, and micro-centrifuge tubes. In one embodiment, a fusion protein can be provided which adds a domain that allows the polypeptide to be bound to a matrix. For example, glutathione-S-transferase/NIMR polypeptide (GST/NIMR polypeptide) fusion proteins can be adsorbed onto glutathione sepharose beads (Sigma Chemical, St. Louis, Mo.) or glutathione derivatized microtitre plates, which are then combined with the cell lysates, e.g. an ³⁵S-labeled, and the test modulating agent, and the mixture incubated under conditions conducive to complex formation, e.g., at physiological conditions for salt and pH, though slightly more stringent conditions may be desired. Following incubation, the beads are washed to remove any unbound label, and the matrix immobilized and radiolabel determined directly (e.g. beads placed in scintilant), or in the supernatant after the complexes are subsequently dissociated. Alternatively, the complexes can be dissociated from the matrix, separated by SDS-PAGE, and the level of NIMR polypeptide-binding polypeptide found in the bead fraction quantitated from the gel using standard electrophoretic techniques.

[0252] Other techniques for immobilizing proteins on matrices are also available for use in the subject assay. For instance, either an NIMR polypeptide or polypeptide to which it binds can be immobilized utilizing conjugation of biotin and streptavidin. For instance, biotinylated NIMR polypeptide molecules can be prepared from biotin-NHS(N-hydroxy-succinimide) using techniques well known in the art (e.g., biotinylation kit, Pierce Chemicals, Rockford, Ill.), and immobilized in the wells of streptavidin-coated 96 well plates (Pierce Chemical). Alternatively, antibodies reactive with NIMR polypeptide but which do not interfere with binding of upstream or downstream elements can be derivatized to the wells of the plate, and NIMR polypeptide trapped in the wells by antibody conjugation. As above, preparations of an NIMR polypeptide-binding polypeptide and a test modulating agent are incubated in the NIMR polypeptide-presenting wells of the plate, and the amount of complex trapped in the well can be quantitated. Exemplary methods for detecting such complexes, in addition to those described above for the GST-immobilized complexes, include immunodetection of complexes using antibodies reactive with the NIMR binding polypeptide, or which are reactive with NIMR polypeptide and compete with the binding polypeptide; as well as enzyme-linked assays which rely on detecting an enzymatic activity associated with the binding polypeptide, either intrinsic or extrinsic activity. In the instance of the latter, the enzyme can be chemically conjugated or provided as a fusion protein with the NIMR binding polypeptide. To illustrate, the NIMR polypeptide can be chemically cross-linked or genetically fused with horseradish peroxidase, and the amount of protein trapped in the complex can be assessed with a chromogenic substrate of the enzyme, e.g. 3,3′-diamino-benzadine terahydrochloride or 4-chloro-1-napthol. Likewise, a fusion protein comprising the protein and glutathione-S-transferase can be provided, and complex formation quantitated by detecting the GST activity using 1-chloro-2,4-dinitrobenzene (Habig et al (1974) J Biol Chem 249:7130).

[0253] For processes which rely on immunodetection for quantitating one of the proteins trapped in the complex, antibodies against the polypeptide, such as anti-NIMR polypeptide antibodies, can be used. Alternatively, the polypeptide to be detected in the complex can be “epitope tagged” in the form of a fusion protein which includes, in addition to the NIMR polypeptide sequence, a second polypeptide for which antibodies are readily available (e.g. from commercial sources). For instance, the GST fusion proteins described above can also be used for quantification of binding using antibodies against the GST moiety. Other useful epitope tags include myc-epitopes (e.g., see Ellison et al. (1991) J Biol Chem 266:21150-21157) which includes a 10-residue sequence from c-myc, as well as the pFLAG system (International Biotechnologies, Inc.) or the pEZZ-protein A system (Pharamacia, N.J.).

[0254] It is also within the scope of this invention to determine the ability of a compound to modulate the interaction between NIMR polypeptide and its target molecule, without the labeling of any of the interactants. For example, a microphysiometer can be used to detect the interaction of NIMR polypeptide with its target molecule without the labeling of either NIMR polypeptide or the target molecule. McConnell, H. M. et al. (1992) Science 257:1906-1912. As used herein, a “microphysiometer” (e.g., Cytosensor) is an analytical instrument that measures the rate at which a cell acidifies its environment using a light-addressable potentiometric sensor (LAPS). Changes in this acidification rate can be used as an indicator of the interaction between compound and receptor.

[0255] This invention further pertains to novel agents identified by the above-described screening assays. Accordingly, it is within the scope of this invention to further use an agent identified as described herein in methods of reducing drug resistance in microbes, e.g., in vivo or ex vivo. For example, an agent identified as described herein (e.g., an NIMR modulating agent such as an antisense NIMR nucleic acid molecule, an NIMR agonist or antagonist, or an NIMR-specific antibody) can be used in an animal model to determine the efficacy, toxicity, or side effects of treatment with such an agent. Alternatively, an agent identified as described herein can be used in an animal model to determine the mechanism of action of such an agent. Additionally, such agents can be used in methods of treatment (in vivo or ex vivo) or in methods of reducing resistance to drugs in the environment. Furthermore, this invention pertains to uses of novel agents identified by the above-described screening assays for treatments as described herein.

[0256] C. Vaccines

[0257] Another aspect of the invention relates to a method for inducing an immunological response in an individual, particularly a mammal, comprising inoculating the individual with an NIMR modulating agent, or a fragment or variant thereof, adequate to produce an immune response and/or to augment an immune response (e.g., an antibody and/or T cell immune response) to ameliorate or prevent infection with a microbe comprising an NIMR polypeptide. The invention also relates to a method of inducing immunological response in an individual which comprises delivering to such individual a nucleic acid vector to direct expression of an NIMR molecule, or a fragment or a variant thereof, for expressing an NIMR molecule, or a fragment or a variant thereof in vivo in order to induce an immunological response, such as, to produce antibody and/or T cell immune response, including, for example, cytokine-producing T cells or cytotoxic T cells, to ameliorate an ongoing infection or to prevent infection. One way of administering the gene is by accelerating it into the desired cells as a coating on particles or otherwise. Such nucleic acid vector may comprise, e.g., DNA, RNA, a modified nucleic acid, or a DNA/RNA hybrid.

[0258] A further aspect of the invention relates to an immunological composition which, when introduced into an individual, induces an immunological response. Such a composition can comprise, e.g., an isolated NIMR polypeptide or an NIMR nucleic acid molecule. The immunologic compsition may be used therapeutically or prophylactically and may be dominated by either a humoral response or a cellular immune response.

[0259] In one embodiment, an NIMR polypeptide or a fragment thereof may be fused with a second polypeptide, which may not by itself produce antibodies, but is capable of stabilizing the first polypeptide and enhancing immunogenic and protective properties. Thus fused recombinant polypeptide, preferably further comprises an antigenic co-protein, such as lipoprotein D from Hemophilus influenzae, Glutathione-S-transferase (GST) or beta-galactosidase, relatively large second proteins which solubilize the polypeptide and facilitate production and purification of an NIMR molecule to which they are fused. Moreover, the second polypeptide may act as an adjuvant in the sense of providing a generalized stimulation of the immune system. The second polypeptide may be attached to either the amino or carboxy terminus of the NIMR polypeptide.

[0260] The use of a nucleic acid molecule of the invention in genetic immunization will preferably employ a suitable delivery method such as direct injection of plasmid DNA into muscles (Wolff et al., Hum Mol Genet 1992, 1:363, Manthorpe et al., Hum. Gene Ther. 1963:4, 419), delivery of DNA complexed with specific polypeptide carriers (Wu et al., J. Biol. Chem. 1989: 264, 16985), coprecipitation of DNA with calcium phosphate (Benvenisty & Reshef, PNAS USA, 1986:83, 9551), encapsulation of DNA in various forms of liposomes (Kaneda et al., Science 1989:243, 375), particle bombardment (Tang et al., Nature 1992, 356:152, Eisenbraun et al., DNA Cell Biol 1993, 12:791) and in vivo infection using cloned retroviral vectors (Seeger et al., PNAS USA 1984:81, 5849).

[0261] In one embodiment, immunostimulatory DNA sequences, such as those described in Sato, Y. et al. Science 273: 352 (1996) can be used in connection with the instant invention.

[0262] In one embodiment, a vaccine formulation comprises an immunogenic recombinant polypeptide of the invention together with a suitable carrier. Preferably, such vaccines are administered parenterally, including, for example, administration that is subcutaneous, intramuscular, intravenous, or intradermal. Formulations suitable for parenteral administration include aqueous and non-aqueous sterile injection solutions which may contain anti-oxidants, buffers, bacteriostats and solutes which render the formulation isotonic with the bodily fluid, preferably the blood, of the individual; and aqueous and non-aqueous sterile suspensions which may include suspending agents or thickening agents. The formulations may be presented in unit-dose or multi-dose containers, for example, sealed ampules and vials and may be stored in a freeze-dried condition requiring only the addition of the sterile liquid carrier immediately prior to use. The vaccine formulation may also include adjuvant systems for enhancing the immunogenicity of the formulation, such as oil-in water systems, alum, or other systems known in the art. The dosage will depend on the specific activity of the vaccine and on the status of the patient and can be readily determined by routine experimentation.

[0263] VI. Compositions Comprising NIMR Modulating Agents

[0264] The compositions of the invention can comprise at least one NIMR modulating agent and one or more pharmaceutically acceptable carriers (additives) and/or diluents. A composition can also include a second antimicrobial agent, e.g., an antimicrobial compound, preferably an antibiotic or a non-antibiotic agent.

[0265] As described in detail below, the compositions can be formulated for administration in solid or liquid form, including those adapted for the following: (George, A. M. & Levy, S. B. (1983) J. Bacteriol. 155, 541-548) oral administration, for example, drenches (aqueous or non-aqueous solutions or suspensions), tablets, boluses, powders, granules, pastes; (Cohen, S. P., Yan, W. & Levy, S. B. (1993) J. Infect. Dis. 168, 484-488) parenteral administration, for example, by subcutaneous, intramuscular or intravenous injection as, for example, a sterile solution or suspension; (Cohen, S. P., Hachler, H. & Levy, S. B. (1993) J. Bacteriol. 175, 1484-1492) topical application, for example, as a cream, ointment or spray applied to the skin; (Sulavick, M. C.; Dazer, M. & Miller, P. F. (1997) J. Bacteriol. 179, 1857-1866) intravaginally or intrarectally, for example, as a pessary, cream, foam, or suppository; or (Cohen, S. P., Levy, S. B., Foulds, J. & Rosner, J. L. (1993) J. Bacteriol 175, 7856-7862) aerosol, for example, as an aqueous aerosol, liposomal preparation or solid particles containing the compound.

[0266] The phrase “pharmaceutically-acceptable carrier” as used herein means a pharmaceutically-acceptable material, composition or vehicle, such as a liquid or solid filler, diluent, excipient, solvent or encapsulating material, involved in carrying or transporting the antimicrobial agents or compounds of the invention from one organ, or portion of the body, to another organ, or portion of the body without affecting its biological effect. Each carrier should be “acceptable” in the sense of being compatible with the other ingredients of the composition and not injurious to the subject. Some examples of materials which can serve as pharmaceutically-acceptable carriers include: (George, A. M. & Levy, S. B. (1983) J. Bacteriol. 155, 541-548) sugars, such as lactose, glucose and sucrose; (Cohen, S. P., Yan, W. & Levy, S. B. (1993) J. Infect. Dis. 168, 484-488) starches, such as corn starch and potato starch; (Cohen, S. P., Hachler, H. & Levy, S. B. (1993) J. Bacteriol. 175, 1484-1492) cellulose, and its derivatives, such as sodium carboxymethyl cellulose, ethyl cellulose and cellulose acetate; (Sulavick, M. C., Dazer, M. & Miller, P. F. (1997) J. Bacteriol. 179, 1857-1866) powdered tragacanth; (Cohen, S. P., Levy, S. B., Foulds, J. & Rosner, J. L. (1993) J. Bacteriol 175, 7856-7862) malt; (Alekshun, M. A. & Levy, S. B. (1999) J. Bacteriol. 181, 4669-4672) gelatin; (George, A. M. & Levy, S. B. (1983) J. Bacteriol. 155, 531-540) talc; (Oethinger, M., Podglajen, I., Kern, W. V. & Levy, S. B. (1998) Antimicrob. Agents Chemother. 42, 2089-2094) excipients, such as cocoa butter and suppository waxes; (Asako, H., Nakajima, K., Kobayashi, K., Kobayashi, M. & Aono, R. (1997) Appl. Environ. Microbiol 63, 1428-1433) oils, such as peanut oil, cottonseed oil, safflower oil, sesame oil, olive oil, corn oil and soybean oil; (White, D. G., Goldman, J. D., Demple, B. & Levy, S. B. (1997) J. Bacteriol. 179, 6122-6126) glycols, such as propylene glycol; (Ariza, R. R., Cohen, S. P., Bachbawat, N., Levy, S. B. & Demple, B. (1994) J. Bacteriol. 176, 143-148) polyols, such as glycerin, sorbitol, mannitol and polyethylene glycol; (McMurry, L. M., Oethinger, M. & Levy, S. B. (1998) FEMS Microbiol. Lett. 166, 305-309) esters, such as ethyl oleate and ethyl laurate; (Moken, M. C., McMurry, L. M. & Levy, S. B. (1997) Antimiclob. Agents Chemother. 41, 2770-2772) agar; (Martin, R. G., Gillette, W. K., Rhee, S. & Rosner, J. L. (1999) Mol. Microbiol. 34, 431-441) buffering agents, such as magnesium hydroxide and aluminum hydroxide; (Maneewannakul, K. & Levy, S. B. (1996) Antimicrob. Agents Chemother. 40, 1695-1698) alginic acid; (Seoane, A. S. & Levy, S. B. (1995) J. Bacteriol. 177, 530-535) pyrogen-free water; (Hamilton, C. M., Aldea, M., Washburn, B. K., Babitzke, P. & Kushner, S. R. (1989) J. Bacteriol. 171, 4617-4622) isotonic saline; (Sambrook, J., Fritsch, E. F. & Maniatis, T. (1989) in Molecular Cloning. A Laboratory Manual, eds. Cold Spring Harbor Laboratory Press (Cold Spring Harbor, N.Y.)) Ringer's solution; (Blattner, F. R., Plunkett, G. I. I. I., Bloch, C. A., Perna, N., Burland, V., Riley, M., Collado-Vides, J., Glasner, J. D., Rode, C. K. M., G. F., Gregor, J., Davis, N. W., Kirkpatrick, H. A., Goeden, M. A., Rose, D. J., Mau, B. & Shao, Y. (1997) Science 277, 1453-1462) ethyl alcohol; (Tao, H., Bausch, C., Richmond, C., Blattner, F. R. & Conway, T. (1999) J. Bacteriol. 181, 6425-6440) phosphate buffer solutions; and (Alekshun, M. N. & Levy, S. B. (1997) Antimicrob. Agents Chemother. 41, 2067-2075) other non-toxic compatible substances employed in pharmaceutical compositions. Proper fluidity can be maintained, for example, by the use of coating materials, such as lecithin, by the maintenance of the required particle size in the case of dispersions, and by the use of surfactants.

[0267] These compositions may also contain additional agents, such as preservatives, wetting agents, emulsifying agents and dispersing agents. Prevention of the action of microorganisms may be ensured by the inclusion of various antibacterial and antifungal agents, for example, paraben, chlorobutanol, phenol sorbic acid, and the like. It may also be desirable to include isotonic agents, such as sugars, sodium chloride, and the like into the compositions. In addition, prolonged absorption of the injectable pharmaceutical form may be brought about by the inclusion of agents which delay absorption such as aluminum monostearate and gelatin.

[0268] In some cases, in order to prolong the effect of a drug, it is desirable to slow the absorption of the drug from subcutaneous or intramuscular injection. This may be accomplished by the use of a liquid suspension of crystalline or amorphous material having poor water solubility. The rate of absorption of the drug then depends upon its rate of dissolution which, in turn, may depend upon crystal size and crystalline form. Alternatively, delayed absorption of a parenterally-administered drug form is accomplished by dissolving or suspending the drug in an oil vehicle.

[0269] Compositions of the present invention may be administered to epithelial surfaces of the body orally, parenterally, topically, rectally, nasally, intravaginally, intracisternally. They are of course given by forms suitable for each administration route. For example, they are administered in tablets or capsule form, by injection, inhalation, eye lotion, ointment, etc., administration by injection, infusion or inhalation; topical by lotion or ointment; and rectal or vaginal suppositories.

[0270] The phrases “parenteral administration” and “administered parenterally” as used herein means modes of administration other than enteral and topical administration, usually by injection, and includes, without limitation, intravenous, intramuscular, intraarterial, intrathecal, intracapsular, intraorbital, intracardiac, intradermal, intraperitoneal, transtracheal, subcutaneous, subcuticular, intraarticular, subcapsular, subarachnoid, intraspinal and intrasternal injection and infusion.

[0271] The phrases “systemic administration,” “administered systemically,” “peripheral administration” and “administered peripherally” as used herein mean the administration of a sucrose octasulfate and/or an antibacterial or a contraceptive agent, drug or other material other than directly into the central nervous system, such that it enters the subject's system and, thus, is subject to metabolism and other like processes, for example, subcutaneous administration.

[0272] In some methods, the compositions of the invention can be topically administered to any epithelial surface. An “epithelial surface” according to this invention is defined as an area of tissue that covers external surfaces of a body, or which and lines hollow structures including, but not limited to, cutaneous and mucosal surfaces. Such epithelial surfaces include oral, pharyngeal, esophageal, pulmonary, ocular, aural, nasal, buccal, lingual, vaginal, cervical, genitourinary, alimentary, and anorectal surfaces.

[0273] Compositions can be formulated in a variety of conventional forms employed for topical administration. These include, for example, semi-solid and liquid dosage forms, such as liquid solutions or suspensions, suppositories, douches, enemas, gels, creams, emulsions, lotions, slurries, powders, sprays, lipsticks, foams, pastes, toothpastes, ointments, salves, balms, douches, drops, troches, chewing gums, lozenges, mouthwashes, rinses.

[0274] Conventionally used carriers for topical applications include pectin, gelatin and derivatives thereof, polylactic acid or polyglycolic acid polymers or copolymers thereof, cellulose derivatives such as methyl cellulose, carboxymethyl cellulose, or oxidized cellulose, guar gum, acacia gum, karaya gum, tragacanth gum, bentonite, agar, carbomer, bladderwrack, ceratonia, dextran and derivatives thereof, ghatti gum, hectorite, ispaghula husk, polyvinypyrrolidone, silica and derivatives thereof, xanthan gum, kaolin, talc, starch and derivatives thereof, paraf fin, water, vegetable and animal oils, polyethylene, polyethylene oxide, polyethylene glycol, polypropylene glycol, glycerol, ethanol, propanol, propylene glycol (glycols, alcohols), fixed oils, sodium, potassium, aluminum, magnesium or calcium salts (such as chloride, carbonate, bicarbonate, citrate, gluconate, lactate, acetate, gluceptate or tartrate).

[0275] Such compositions can be particularly useful, for example, for treatment or prevention of an unwanted infections e.g., of the oral cavity, including cold sores, infections of eye, the skin, or the lower intestinal tract. Standard composition strategies for topical agents can be applied to the antimicrobial compounds, or pharmaceutically acceptable salts thereof in order to enhance the persistence and residence time of the drug, and to improve the prophylactic efficacy achieved.

[0276] For topical application to be used in the lower intestinal tract or vaginally, a rectal suppository, a suitable enema, a gel, an ointment, a solution, a suspension or an insert can be used. Topical transdermal patches may also be used. Transdermal patches have the added advantage of providing controlled delivery of the compositions of the invention to the body. Such dosage forms can be made by dissolving or dispersing the agent in the proper medium.

[0277] Compositions of the invention can be administered in the form of suppositories for rectal or vaginal administration. These can be prepared by mixing the agent with a suitable non-irritating carrier which is solid at room temperature but liquid at rectal temperature and therefore will melt in the rectum or vagina to release the drug. Such materials include cocoa butter, beeswax, polyethylene glycols, a suppository wax or a salicylate, and which is solid at room temperature, but liquid at body temperature and, therefore, will melt in the rectum or vaginal cavity and release the active agent.

[0278] Compositions which are suitable for vaginal administration also include pessaries, tampons, creams, gels, pastes, foams, films, or spray compositions containing such carriers as are known in the art to be appropriate. The carrier employed in the sucrose octasulfate/contraceptive agent should be compatible with vaginal administration and/or coating of contraceptive devices. Combinations can be in solid, semi-solid and liquid dosage forms, such as diaphragm, jelly, douches, foams, films, ointments, creams, balms, gels, salves, pastes, slurries, vaginal suppositories, sexual lubricants, and coatings for devices, such as condoms, contraceptive sponges, cervical caps and diaphragms.

[0279] For ophthalmic applications, the pharmaceutical compositions can be formulated as micronized suspensions in isotonic, pH adjusted sterile saline, or, preferably, as solutions in isotonic, pH adjusted sterile saline, either with or without a preservative such as benzylalkonium chloride. Alternatively, for ophthalmic uses, the compositions can be formulated in an ointment such as petrolium. Exemplary ophthalmic compositions include eye ointments, powders, solutions and the like.

[0280] Powders and sprays can contain, in addition to sucrose octasulfate and/or antibiotic or contraceptive agent(s), carriers such as lactose, talc, silicic acid, aluminum hydroxide, calcium silicates and polyamide powder, or mixtures of these substances. Sprays can additionally contain customary propellants, such as chlorofluorohydrocarbons and volatile unsubstituted hydrocarbons, such as butane and propane.

[0281] Ordinarily, an aqueous aerosol is made by formulating an aqueous solution or suspension of the agent together with conventional pharmaceutically acceptable carriers and stabilizers. The carriers and stabilizers vary with the requirements of the particular compound, but typically include nonionic surfactants (Tweens, Pluronics, or polyethylene glycol), innocuous proteins like serum albumin, sorbitan esters, oleic acid, lecithin, amino acids such as glycine, buffers, salts, sugars or sugar alcohols. Aerosols generally are prepared from isotonic solutions.

[0282] Compositions of the invention can also be orally administered in any orally-acceptable dosage form including, but not limited to, capsules, cachets, pills, tablets, lozenges (using a flavored basis, usually sucrose and acacia or tragacanth), powders, granules, or as a solution or a suspension in an aqueous or non-aqueous liquid, or as an oil-in-water or water-in-oil liquid emulsion, or as an elixir or syrup, or as pastilles (using an inert base, such as gelatin and glycerin, or sucrose and acacia) and/or as mouth washes and the like, each containing a predetermined amount of sucrose octasulfate and/or antibiotic or contraceptive agent(s) as an active ingredient. A compound may also be administered as a bolus, electuary or paste. In the case of tablets for oral use, carriers which are commonly used include lactose and corn starch. Lubricating agents, such as magnesium stearate, are also typically added. For oral administration in a capsule form, useful diluents include lactose and dried corn starch. When aqueous suspensions are required for oral use, the active ingredient is combined with emulsifying and suspending agents. If desired, certain sweetening, flavoring or coloring agents may also be added.

[0283] Tablets, and other solid dosage forms, such as dragees, capsules, pills and granules, may be scored or prepared with coatings and shells, such as enteric coatings and other coatings well known in the pharmaceutical-formulating art. They may also be formulated so as to provide slow or controlled release of the active ingredient therein using, for example, hydroxypropylmethyl cellulose in varying proportions to provide the desired release profile, other polymer matrices, liposomes and/or microspheres. They may be sterilized by, for example, filtration through a bacteria-retaining filter, or by incorporating sterilizing agents in the form of sterile solid compositions which can be dissolved in sterile water, or some other sterile injectable medium immediately before use. These compositions may also optionally contain opacifying agents and may be of a composition that they release the active ingredient(s) only, or preferentially, in a certain portion of the gastrointestinal tract, optionally, in a delayed manner. Examples of embedding compositions which can be used include polymeric substances and waxes. The active ingredient can also be in micro-encapsulated form, if appropriate, with one or more of the above-described excipients.

[0284] Liquid dosage forms for oral administration include pharmaceutically acceptable emulsions, microemulsions, solutions, suspensions, syrups and elixirs. In addition to the active ingredient, the liquid dosage forms may contain inert diluents commonly used in the art, such as, for example, water or other solvents, solubilizing agents and emulsifiers, such as ethyl alcohol, isopropyl alcohol, ethyl carbonate, ethyl acetate, benzyl alcohol, benzyl benzoate, propylene glycol, 1,3-butylene glycol, oils (in particular, cottonseed, groundnut, corn, germ, olive, castor and sesame oils), glycerol, tetrahydrofuryl alcohol, polyethylene glycols and fatty acid esters of sorbitan, and mixtures thereof.

[0285] Besides inert diluents, the oral compositions can also include adjuvants such as wetting agents, emulsifying and suspending agents, sweetening, flavoring, coloring, perfuming and preservative agents.

[0286] Suspensions, in addition to the antimicrobial agent(s) may contain suspending agents as, for example, ethoxylated isostearyl alcohols, polyoxyethylene sorbitol and sorbitan esters, microcrystalline cellulose, aluminum metahydroxide, bentonite, agar-agar and tragacanth, and mixtures thereof.

[0287] Sterile injectable forms of the compositions of this invention can be aqueous or oleaginous suspensions. These suspensions may be formulated according to techniques known in the art using suitable dispersing or wetting agents and suspending agents. Wetting agents, emulsifiers and lubricants, such as sodium lauryl sulfate and magnesium stearate, as well as coloring agents, release agents, coating agents, sweetening, flavoring and perfuming agents, preservatives and antioxidants can also be present in the compositions.

[0288] The sterile injectable preparation may also be a sterile injectable solution or suspension in a nontoxic parenterally-acceptable diluent or solvent, for example as a solution in 1,3-butanediol. Among the acceptable vehicles and solvents that may be employed are water, Ringer's solution and isotonic sodium chloride solution. In addition, sterile, fixed oils are conventionally employed as a solvent or suspending medium. For this purpose, any bland fixed oil may be employed including synthetic mono-or di-glycerides. Fatty acids, such as oleic acid and its glyceride derivatives are useful in the preparation of injectables, as are natural pharmaceutically-acceptable oils, such as olive oil or castor oil, especially in their polyoxyethylated versions. These oil solutions or suspensions may also contain a long-chain alcohol diluent or dispersant.

[0289] In the case of modulators of the activity and/or expression of NIMR molecules which are nucleic acid molecules, the optimal course of administration of the oligomers may vary depending upon the desired result or on the subject to be treated. As used in this context “administration” refers to contacting cells with oligomers, e.g., in vivo or ex vivo. The dosage of nucleic molecule may be adjusted to optimally regulate expression of a protein translated from a target mRNA, e.g., as measured by a readout of RNA stability or by a therapeutic response, without undue experimentation. For example, expression of the protein encoded by the nucleic acid can be measured to determine whether or dosage regimen needs to be adjusted accordingly. In addition, an increase or decrease in RNA and/or protein levels in a cell or produced by a cell can be measured using any art recognized technique. By determining whether transcription has been decreased, the effectiveness of the molecule can be determined.

[0290] As used herein, “pharmaceutically acceptable carrier” includes appropriate solvents, dispersion media, coatings, antibacterial and antifungal agents, isotonic and absorption delaying agents, and the like. The use of such media and agents for pharmaceutical active substances is well known in the art. Except insofar as any conventional media or agent is incompatible with the active ingredient, it can be used in the therapeutic compositions. Supplementary active ingredients can also be incorporated into the compositions.

[0291] Compositions may be incorporated into liposomes or liposomes modified with polyethylene glycol or admixed with cationic lipids for parenteral administration. Incorporation of additional substances into the liposome, for example, antibodies reactive against membrane proteins found on specific target microbes, can help target the molecule to specific cell types.

[0292] Moreover, the present invention provides for administering the subject compositions with an osmotic pump providing continuous infusion of the compositions, for example, as described in Rataiczak et al. (1992 Proc. Natl. Acad. Sci. USA 89:11823-11827). Such osmotic pumps are commercially available, e.g., from Alzet Inc. (Palo Alto, Calif.). Topical administration and parenteral administration in a cationic lipid carrier are preferred.

[0293] With respect to in vivo applications, the formulations of the present invention can be administered to a patient in a variety of forms adapted to the chosen route of administration, namely, parenterally, orally, or intraperitoneally. Parenteral administration, which is preferred, includes administration by the following routes: intravenous; intramuscular; interstitially; intraarterially; subcutaneous; intra ocular; intrasynovial; trans epithelial, including transdermal; pulmonary via inhalation; ophthalmic; sublingual and buccal; topically, including ophthalmic; dermal; ocular; rectal; and nasal inhalation via insufflation. Intravenous administration is preferred among the routes of parenteral administration.

[0294] Pharmaceutical preparations for parenteral administration include aqueous solutions of the active compounds in water-soluble or water-dispersible form. In addition, suspensions of the active compounds as appropriate oily injection suspensions may be administered. Suitable lipophilic solvents or vehicles include fatty oils, for example, sesame oil, or synthetic fatty acid esters, for example, ethyl oleate or triglycerides. Aqueous injection suspensions may contain substances which increase the viscosity of the suspension include, for example, sodium carboxymethyl cellulose, sorbitol, and/or dextran, optionally, the suspension may also contain stabilizers.

[0295] Drug delivery vehicles can be chosen e.g., for in vitro, for systemic, or for topical administration. These vehicles can be designed to serve as a slow release reservoir or to deliver their contents directly to the target cell. An advantage of using some direct delivery drug vehicles is that multiple molecules are delivered per uptake. Such vehicles have been shown to increase the circulation half-life of drugs that would otherwise be rapidly cleared from the blood stream. Some examples of such specialized drug delivery vehicles which fall into this category are liposomes, hydrogels, cyclodextrins, biodegradable nanocapsules, and bioadhesive microspheres.

[0296] The subject compositions may be incorporated into liposomes or liposomes modified with polyethylene glycol or admixed with cationic lipids for parenteral administration. Incorporation of additional substances into the liposome, for example, antibodies reactive against membrane proteins found on specific target microbes, can help target the compositions to specific cell types.

[0297] Moreover, the present invention provides for administering the subject compositions with an osmotic pump providing continuous infusion of nucleic acid molecules, for example, as described in Rataiczak et al. (1992 Proc. Natl. Acad. Sci. USA 89:11823-11827). Such osmotic pumps are commercially available, e.g., from Alzet Inc. (Palo Alto, Calif). Topical adminis tration and parenteral administration in a cationic lipid carrier are preferred.

[0298] With respect to in vivo applications, the formulations of the present invention can be administered to a patient in a variety of forms adapted to the chosen route of administration, namely, parenterally, orally, or intraperitoneally. Parenteral administration, which is preferred, includes administration by the following routes: intravenous; intramuscular; interstitially; intraarterially; subcutaneous; intra ocular; intrasynovial; trans epithelial, including transdermal; pulmonary via inhalation; ophthalmic; sublingual and buccal; topically, including ophthalmic; dermal; ocular; rectal; and nasal inhalation via insufflation. Intravenous administration is preferred among the routes of parenteral administration.

[0299] Pharmaceutical preparations for parenteral administration include aqueous solutions of the active compounds in water-soluble or water-dispersible form. In addition, suspensions of the active compounds as appropriate oily injection suspensions may be administered. Suitable lipophilic solvents or vehicles include fatty oils, for example, sesame oil, or synthetic fatty acid esters, for example, ethyl oleate or triglycerides. Aqueous injection suspensions may contain substances which increase the viscosity of the suspension include, for example, sodium carboxymethyl cellulose, sorbitol, and/or dextran, optionally, the suspension may also contain stabilizers.

[0300] Drug delivery vehicles can be chosen e.g., for in vitro, for systemic, or for topical administration. These vehicles can be designed to serve as a slow release reservoir or to deliver their contents directly to the target cell. An advantage of using some direct delivery drug vehicles is that multiple molecules are delivered per uptake. Such vehicles have been shown to increase the circulation half-life of drugs that would otherwise be rapidly cleared from the blood stream. Some examples of such specialized drug delivery vehicles which fall into this category are liposomes, hydrogels, cyclodextrins, biodegradable nanocapsules, and bioadhesive microspheres.

[0301] The described compositions may be administered systemically to a subject. Systemic absorption refers to the entry of drugs into the blood stream followed by distribution throughout the entire body. Administration routes which lead to systemic absorption include: intravenous, subcutaneous, intraperitoneal, and intranasal. Each of these administration routes delivers the compositions to accessible diseased cells. Following subcutaneous administration, the therapeutic agent drains into local lymph nodes and proceeds through the lymphatic network into the circulation. The rate of entry into the circulation has been shown to be a function of molecular weight or size. The use of a liposome or other drug carrier localizes the compositions at the lymph node. The nucleic acid molecule can be modified to diffuse into the cell, or the liposome can directly participate in the delivery of the composition into the cell.

[0302] For prophylactic applications, the pharmaceutical composition of the invention can be applied prior to physical contact with a microbe. The timing of application prior to physical contact can be optimized to maximize the prophylactic effectiveness of the compound. The timing of application will vary depending on the mode of administration, the epithelial surface to which it is applied, the surface area, doses, the stability and effectiveness of composition under the pH of the epithelial surface, the frequency of application, e.g., single application or multiple applications. Preferably, the timing of application can be determined such that a single application of composition is sufficient. One skilled in the art will be able to determine the most appropriate time interval required to maximize prophylactic effectiveness of the compound.

[0303] One of ordinary skill in the art can determine and prescribe the effective amount of the pharmaceutical composition required. For example, one could start doses at levels lower than that required in order to achieve the desired therapeutic effect and gradually increase the dosage until the desired effect is achieved. In general, a suitable daily dose of a composition of the invention will be that amount of the composition which is the lowest dose effective to produce a therapeutic effect. Such an effective dose will generally depend upon the factors described above. It is preferred that administration be intravenous, intracoronary, intramuscular, intraperitoneal, or subcutaneous.

[0304] Another aspect of the invention pertains to kits for carrying out the screening assays or modulatory methods of the invention. For example, a kit for carrying out a screening assay of the invention can include a cell comprising an NIMR polypeptide, means for determining NIMR polypeptide activity and instructions for using the kit to identify modulators of NIMR activity.

[0305] In another embodiment, the invention provides a kit for carrying out a modulatory method of the invention. The kit can include, for example, a modulatory agent of the invention (e.g., an NIMR inhibitory or stimulatory agent) in a suitable carrier and packaged in a suitable container with instructions for use of the modulatory agent to modulate NIMR expression or activity.

[0306] The practice of the present invention will employ, unless otherwise indicated, conventional techniques of cell biology, cell culture, molecular biology, genetics, microbiology, recombinant DNA, and immunology, which are within the skill of the art. Such techniques are explained fully in the literature. See, for example, Genetics; Molecular Cloning A Laboratory Manual, 2nd Ed., ed. by Sambrook, J. et. al. (Cold Spring Harbor Laboratory Press (1989)); Short Protocols in Molecular Biology, 3rd Ed., ed. by Ausubel, F. et al. (Wiley, NY (1995)); DNA Cloning, Volumes I and II (D. N. Glover ed., 1985); Oligonucleotide Synthesis (M. J. Gait ed. (1984)); Mullis et al. U.S. Pat. No. 4,683,195; Nucleic Acid Hybridization (B. D. Hames & S. J. Higgins eds. (1984)); the treatise, Methods In Enzymology (Academic Press, Inc., N.Y); Immunochemical Methods In Cell And Molecular Biology (Mayer and Walker, eds., Academic Press, London (1987)); Handbook Of Experimental Immunology, Volumes I-IV (D. M. Weir and C. C. Blackwell, eds. (1986)); and Miller, J. Experiments in Molecular Genetics (Cold Spring Harbor Press, Cold Spring Harbor, N.Y. (1972)).

[0307] The contents of all references, pending patent applications and published patents, cited throughout this application are hereby expressly incorporated by reference. Each reference disclosed herein is incorporated by reference herein in its entirety. Any patent application to which this application claims priority is also incorporated by reference herein in its entirety.

[0308] The invention is further illustrated by the following examples, which should not be construed as further limiting.

### EXAMPLES

### Example 1

[0309] The following materials and methods were used in the examples:

[0310] Bacterial strains, plasmids and growth conditions. E. coli K-12 strain AG100 (George, A. M. & Levy, S. B. (1983) J. Bacteriol. 155, 541-548) was used for the PCR amplification of specific DNA probes. E coli AG100Kan, an isogenic strain of AG100 containing a 1.2 kb kanamycin resistance cassette in the place of the mar locus (Maneewannakul, K. & Levy, S. B. (1996) Antimicrob. Agents Chemother. 40, 1695-1698) was used in all the experiments described. pAS10 (Seoane, A. S. & Levy, S. B. (1995) J. Bacteriol. 177, 530-535), derived from the temperature-sensitive pMAK705 (Chl^{R}) (Hamilton, C. M., Aldea, M., Washburn, B. K., Babitzke, P. & Kushner, S. R. (1989) J. Bacteriol. 171, 4617-4622), carries a 2.5 kb PCR amplified fragment containing the marCORAB sequence bearing the marR5 mutation, which produces no MarR and thus mediates constitutive MarA expression.

[0311] Bacterial strains were grown in Luria Bertani (LB) media (composition per litre: 10 g tryptone, 10 g NaCl, 5 g yeast extract) at 30° C. with vigorous aeration. E. coli AG100Kan cells were made competent by the standard CaCl₂, method (Sambrook, J., Fritsch, E. F. & Maniatis, T. (1989) in Molecular Cloning. A Laboratory Manual, eds. Cold Spring Harbor Laboratory Press (Cold Spring Harbor, N.Y.)) and transformants containing the plasmids pMAK705 or pAS10 were maintained in the presence of 25 μg ml⁻¹ chloramphenicol (Sigma, St. Louis, Mo.).

[0312] RNA extraction. Total RNA was isolated by a modification of the hot-acidic phenol extraction method (Sigma-Genosys Biotechnologies, Inc., The Woodlands, Tex.). Overnight cultures were diluted 250-fold in fresh LB medium, and grown to mid-logarithmic phase (A₅₃₀=0.35-0.40). Bacterial pellets from 5 ml cell cultures were harvested at 4° C., and resuspended in 250 μl ice-cold resuspension buffer (0.3 M sucrose-10 mM sodium acetate, pH 4.2) and 37.5 μl of ice-cold 0.5 M EDTA. After incubation on ice for 5 min, cells were lysed by adding 375 μl lysis buffer (2%, sodium dodecyl sulphate, 10 mM sodium acetate, pH 4.2) and heating at 65° C. for 3 min. The suspension was extracted three times with 700 μl of pre-warmed acidic phenol (65° C.) (Sigma) and the aqueous phase was extracted, first with 700 μl of a mixture of acidic phenol:chlorophorm:isoamyl alcohol (25:24:1), and then with an equal volume of chlorophorm:isoamylalcollol (24:1). The RNA in the aqueous phase was ethanol precipitated at −80° C., and the RNA pellet rinsed with 70% ethanol and resuspended in 100 μl of RNase-free water (Ambion Inc., Austin, Tex.). Samples were treated with DNaseI (amplification grade, Life Technologies Inc., Gaithersburg, Md.), following the manufacturer's instructions, to eliminate DNA contamination. The absence of genomic DNA in the RNA was confirmed by examining samples of the RNA in non-denaturing 1.2%, agarose gels, and by performing PCR on DNase treated RNA samples using primers known to target the genomic DNA. The RNA concentration was determined spectrophotometrically (Sambrook, J., Fritsch, E. F. & Maniatis, T. (1989) in Molecular Cloning A Laboratory Manual, eds. Cold Spring Harbor Laboratory Press (Cold Spring Harbor, N.Y.)).

[0313] Preparation of labeled cDNA and hybridization to the arrays. Labeled cDNA was prepared using the E. coli cDNA labeling primers (Sigma-Genosys) following the manufacturer's instructions. The primers were annealed to 1 μg of total RNA in the presence of 333 μM dATP, dCTP and dTTP and 1× reverse transcriptase buffer at 90° C. for 2 min. The mixture was cooled to 42° C. and 50 U AMV reverse transcriptase (Boehringer-Mannheim, Indianapolis, Ind.) and 20 μCi ³²P-α-dTP (2,000 Ci/mmol) (New England Nuclear, Boston, Mass.) were added. Incubation was at 42° C. for 2 h 30 min. The unincorporated nucleotides were removed from the labeled cDNA using a NucTrap probe purification column (Stratagene, La Jolla, Calif.) prior to hybridization. Hybridization of the purified labeled cDNA to the Panorama E. coli Gene arrays (SigmaGenosys) was performed in roller bottles following the manufacturer's instructions. Essentially, arrays were pre-wet in 2×SSPE and then pre-hybridized for 2 h at 65° C. in 5 ml pre-warned hybridization solution (5×SSPE, 2% SDS, 1× Denhardt's reagent and 100 μg ml⁻¹ denatured salmon sperm DNA). Denatured labeled cDNA in 5 ml hybridization solution replaced the prehybridization solution and hybridization proceeded for ˜18 h at 65° C. The arrays were washed 3× with 50 ml wash buffer (0.5×SSPE-0.2% SDS) at room temperature for 3 min intervals and 3× with 100 ml pre-warmed (65° C.) wash buffer for 20 min intervals. Hybridizing signals on the membrane were visualized by exposure to Kodak BioMax MR X-ray film and to a Kodak storage phosphorimager screen SO230 (Molecular Dynamics, Sunnivale, Calif.). Phosphor screens were scanned, after 1 to 3 days exposure, at 50 micron pixel resolution in a Storm 860 phosphorimaging instrument (Molecular Dynamics). Arrays were stripped by immersing the membranes in a boiling solution of 0.5% SDS (w/v) and removal of the probe was confirmed before reuse as described above.

[0314] Description and quantification of the arrays. The Panorama E. coli Gene Arrays (Sigma-Genosys) contain 4,290 PCR-amplified Orfs of the E. coli K-12 (MG1655) genome (Blattner, F. R., Plunkett, G. 1.1. I., Bloch, C. A., Perna, N., Burland, V., Riley, M., Collado-Vides, J., Glasner, J. D., Rode, C. K. M., G. F., Gregor, J., Davis, N. W., Kirkpatrick, H. A., Goeden, M. A., Rose, D. J., Mau, B. & Shao, Y. (1997) Science 277, 1453-1462), spotted in duplicate (see Tao et al. (Tao, H., Bausch, C., Richmond, C., Blattner, F. R. & Conway, T. (1999) J. Bacteriol. 181, 6425-6440) for a more detailed description of the arrays).

[0315] Quantification of the hybridizing signals in the phosphoimager file was carried out by Sigma-Genosys using the Array Vision&Trade software (Imaging Research, Inc.). The relative pixel values for the duplicate spots of each gene were averaged and normalized by expressing the averaged spot signal as a percentage to the signal from the averaged pixel values of the genomic DNA spots in the respective field where each gene was printed (FIG. 1). In FIG. 1, The ratio between these values in samples from cells expressing or lacking MarA represented the fold change in gene expression. Background values were determined for each field in each array by averaging the pixel values of the empty spaces located in the same secondary grid as the genomic DNA (FIG. 1). Genes whose averaged pixel values were close to background (less than a 2-fold difference from background values) in both experimental and control samples were not considered here. Identical arrays were probed with labeled ³²P-cDNA populations prepared from total RNA from mar-deleted, AG100Kan[pMAK705] (panel A) and mar-expressing, AG100Kan[pAS00] (panel B) strains. Columns (1-24) and rows (A-P) forming the primary grid in Field 1 of the autoradiogram are labeled. Fields 2 and 3 are similar in format to Field I and are not shown. The four spots in the four corners of each field are genomic DNA. Boxes underneath correspond to expanded views of representative areas shown in (A) and (B) where changes in expression levels are visible for several genes (7 of the differentially expressed genes are labeled as examples).

[0316] All the genes identified by computing analysis as members of the mar regulon were confirmed by visual analysis of autoradiograms of the arrays in three independent experiments. Only those genes which satisfied both criteria were classified as members of the mar regulon.

[0317] Northern blot analysis. Duplicate samples of DNaseI treated total RNA (5-10 μg) were fractionated electrophoretically on 1-1.2%, denaturing formaldehyde-agarose gels, and RNA was transferred to nylon membranes (Hybond-N, Amersham Life Science Inc., Arlington Heights, Ill.) using established capillary blotting methods in 10×SSC (Sambrook, J., Fritsch, E. F. & Maniatis, T. (1989) in Molecular Cloning. A Laboratory Manual, eds. Cold Spring Harbor Laboratory Press (Cold Spring Harbor, N.Y.).). DNA probes for specific E. coli genes were amplified by PCR from E. coli AG100 chromosomal DNA using the appropriate E. coli ORFmer PCR primer pairs (Sigma-Genosys), according to the supplier specifications. After amplification, the PCR products were purified from agarose gels using the Qiaex II gel extraction kit (Qiagen Inc., Valencia, Calif.) and quantified by comparison to DNA size standards (Life Technologies) of known concentration. Labeling of DNA probes with [³²P]-dCTP (New England Nuclear) using the RTS RadPrime DNA labeling system (Life Technologies) was carried out according to the manufacturer's instructions. Hybridizations were performed using standard procedures at 65° C. (Sambrook, J., Fritsch, E. F. & Maniatis, T. (1989) in Molecular Cloning. A Laboratory Manual, eds. Cold Spring Harbor Laboratory Press (Cold Spring Harbor, N.Y.).), and RNA membranes were washed at high stringency for 15 min intervals, four times in 2×SSC buffer/0.1% SDS and 2 to 4 times in 0.1×SSC buffer/0.1% SDS. Hybridizing bands were visualized as described for the E. coli gene macroarrays.

[0318] DNA manipulations. Genomic and plasmid DNA were purified from E. coli strains using the QIAamp Tissue kit and the QIAprep spin Miniprep kit (Qiagen) respectively, following manufacturer's instructions.

### EXAMPLE 1

### Identification of genes regulated by MarA. DNA macroarrays, constructed for E. coli, which contain most of the genomic Orfs (Blattner, F. R., Plunkett, G. I. I. I., Bloch, C. A., Perna, N., Burland, V., Riley, M., Collado-Vides, J., Glasner, J. D., Rode, C. K. M., G. F., Gregor, J., Davis, N. W., Kirkpatrick, H. A., Goeden, M. A., Rose, D. J., Mau, B. & Shao, Y. (1997) Science 277, 1453-1462), allowed studies of expression of the complete genome in the presence or absence of MarA. E. coli AG100K a strain (Maneewannakul, K. & Levy, S. B. (1996) Antimicrob. Agents Chemother. 40, 1695-1698) bearing only plasmid pMAK705 represented the control, i.e. deficient in mar expression. The experimental strain AG100Kan[pAS10] containing the pMAK705-derived plasmid pAS10, which expresses MarA constitutively (Seoane, A. S. & Levy, S. B. (1995) J. Bacteriol. 177, 530-535). Antibiotic susceptibility assayed using the E-test method showed the expected increase (˜4-20 fold) in resistance in the mar expressing strain as corn pared to the control to the antibiotics tested, including norfloxacin, nalidixic acid, tetracycline and ampicillin (data not shown).

[0319] ³³P-labeled cDNAs prepared from RNA extracted from mar-deleted and mar-expressing strains were hybridized to paired macroarrays and phosphorimager files and autoradiograms were obtained (FIG. 1). Previously ˜15 genes were known to be regulated by MarA (Alekshun, M. N. & Levy, S. B. (1997) Antimicrob. Agents Chemother. 41, 2067-2075). The gene macroarrays identified a total of 62 genes responsive to mar-regulation in logarithmic phase: 47 induced and 15 repressed (Table 3). Only those findings detected in all three experiments were included in the list.

[0320] The signals for the three genes encoded by the marRAB operon were easily detected in the cDNA from the mar-expressing but not from the mar-deleted strain (FIG. 1). This finding was reassuring given that cDNAs from genes belonging to the same family of homologues (e.g. soxS and rob for marA) could have caused some level of non-specific binding (Richmond, C. S., Glasner, J. D., Mau, R., Jin, H. & Blattner, F. R. (1999) Nucleic Acids Res. 27, 38213835). For marR, marA and marB, the expression was 31-fold, 35-fold and 12-fold higher (averaged values) than in control samples (Table 3). Although the signal for marB expression was consistently less than the signals for marR and marA expression the meaning is unclear. Since the spotted PCR products differ in length (which has an effect in hybridizing intensities, (Richmond, C. S., Glasner, J. D., Mau, R., Jin, H. & Blattner, F. R. (1999) Nucleic Acids Res. 27, 38213835)), and because the efficiency of reverse transcription will vary between different RNAs, the results do not allow comparative analysis between different genes. The expression of the divergent marC, (referred to as ydeB in GenBank), was close to background in the experimental sample. Thus it does not appear to be affected by MarA under these conditions.

[0321] The mar-regulated genes identified are dispersed throughout the chromosome and are involved in a wide range of cell functions (FIG. 2, Table 2). In FIG. 2, the internal circle represents the chromosome of E. coli K-12 MG1655 divided in intervals of 1 minute, while the external is divided in intervals of 100,000 nucleotide residues (adapted from Blattner et al. (Blattner, F. R., Plunkett, G. I. I. I., Bloch, C. A., Perna, N., Burland, V., Riley, M., Collado-Vides, J., Glasner, J. D., Rode, C. K. M., G. F., Gregor, J., Davis, N. W., Kirkpatrick, H. A., Goeden, M. A., Rose, D. J., Mau, B. & Shao, Y. (1997) Science 277, 1453-1462)). Genes induced by mar are plotted to face the exterior of the chromosome and genes repressed by mar are plotted to face the interior of the chromosome. Bold faced genes read in the clockwise direction, while regular font represents those genes on the opposite strand (Blattner, F. R., Plunkett, G. I. I. I., Bloch, C. A., Perna; N., Burland, V., Riley, M., Collado-Vides, J., Glasner, J. D., Rode, C. K. M., G. F., Gregor, J., Davis, N. W., Kirkpatrick, H. A., Goeden, M. A., Rose, D. J., Mau, B. & Shao, Y. (1997) Science 277, 1453-1462). Genes that are in the immediate vicinity of each other were placed together over the same designation line.

[0322] In addition to changing the expression of genes with known functions, MarA also changed the expression of genes yet uncharacterized. For instance the gene bO447 encodes a putative LRP-like transcriptional regulator, yadG encodes a putative ATP-binding component of a transport system, while bl448 and yggJ have no known homologues. It is not clear how all these genes relate to each other in the development of the Mar phenotype. gshB is involved in the synthesis of glutathione, which is part of the cell's antioxidants defenses (Hidalgo, E. & Demple, B. (1995) in Regulation of gene expression in Escherichia coli., eds. Lin, E. C. & Lynch, A. S. (R. G. Landes Company, Austin), pp. 433-450), and among other functions, is involved in the reduction of OxyR to its normal redox state (Chater, K. F. & Nikaido, H. (1999) Curr. Opin. Microbiol. 2, 121-125) and in the detoxification of toxic electrophiles (Ferguson, G. P. (1999) Trends Microbiol. 7, 242-247). The induction of gshB by MarA could help to explain why resistance to oxidative stress is a Mar phenotype.

### Example 2

### Confirmation of Previously Identified mar Regulated Genes

[0323] The differential expression of most of the genes previously identified as part of the, mar regulon, e.g. inaA, sodA, ompF, zwf and fumC (Ariza, R. R., Cohen, S. P., Bachbawat, N., Levy, S. B. & Demple, B. (1994) J. Bacteriol. 176, 143-148, Greenberg, J. T., Chou, J. H., Monach, P. A. & Demple, B. (1991) J. Bacteriol. 173, 4433-4439, Jair, K.-W., Martin, R. G., Rosner, J. L., Fujita, N., Ishihama, A. & Wolf, J. R. E. (1995) J. Bacteriol 177, 7100-7104, Rosner, J. L. & Slonczewski, J. L. (1994) J. Bacteriol. 176, 6262-6269), was confirmed in the current study (Table 3). A major role in the Mar phenotype is played by the efflux system acrAB, which acts by pumping toxic compounds out of the cell (White, D. G., Goldman, J. D., Demple, B. & Levy, S. B. (1997) J. Bacteriol. 179, 6122-6126, Moken, M. C., McMurry, L. M. & Levy, S. B. (1997) Antimiclob. Agents Chemother. 41, 2770-2772, Okusu, H., Ma, D. & Nikaido, H. (1996) J. Bacteriol. 178, 306-308). An increase in the expression of the acrA gene of the acrAB operon was also observed (Table 3), however the expression values for acrB were not above background. As described earlier for marB, this kind of finding is not fully understood, but could arise from differential processing of the polycistronic transcript and/or by slight differences in transcript stability.

[0324] Previous studies suggest co-ordinate activation of TolC and the AcrAB efflux pump in the development of the Mar phenotype, particularly in the context of organic solvent tolerance (Fralick, J. A. (1996) J. Bacteriol. 178, 5803-5805, Aono, R., Tsukagoshi, N. & Yamamoto, M. (1998) J. Bacteriol. 180, 938-944). Changes in the expression of outer membrane proteins (e.g. increased OmpX, and decreased OmpF and LamB) have also been reported in E. coli marR mutants and wild type strains over-expressing MarA (Aono, R., Tsukagoshi, N. & Yamamoto, M. (1998) J. Bacteriol. 180, 938-944). MarA expression is shown herein to increase the transcription of both tolC and ompX (Table 3). Although a decrease in the levels of ompF, was observed, there was no evidence for a similar decrease in lamB expression, suggesting that LamB may not be the underproduced protein identified in the earlier study (Aono, R., Tsukagoshi, N. & Yamamoto, M. (1998) J. Bacteriol. 180, 938-944).

[0325] Transcription of the previously identified mlrl (b1451) and mlr2 (b0603) genes (Seoane, A. S. & Levy, S. B. (1995) J Bacteriol. 177, 530-535) was increased in the mar expression strain in two experiments, but appeared to be unaffected in a third experiment, so they were not included in Table 3. Expression of the slp gene, previously described as repressed by MarA (Seoane, A. S. & Levy, S. B. (1995) J. Bacteriol. 177, 530-535) was so low that any mar-mediated changes would have been difficult to detect. This latter observation may reflect these experiments being performed on cells in mid-logarithmic phase while slp is a stationary phase inducible gene. Since the identity of the two mar-responsive genes soi-17 and soi-19 (Greenberg, J. T., Chou, J. H., Monach, P. A. & Demple, B. (1991) J. Bacteriol. 173, 4433-4439) remains to be determined, their differential expression could not be confirmed by the macroarrays analysis.

### Example 3

[0326] Relationship between soxRS and mar regulons. SoxS is the ractivator of the soxRS regulon (Demple, B. (1996) Gene 179, 53-57), which mediates a cellular response to oxidative stress, and, like MarA, is a member of the XylS/AraC of transcriptional activators (Gallegos, M.-T., Schleif, R., Bairoch). Many oxidative stress genes, that are known to respond to SoxS, are also responsive to MarA (Jair, K.-W., Martin, R. G., Rosner, J. L., Fujita, N., Ishihama, A. & Wolf, J. R. E. (1995) J. Bacteriol 177, 7100-7104, Miller, P. F., Gambino, L. F., Sulavik, M. C. & Gracheck, S. J. (1994) Antimicrob. Agents Chemother. 38, 1773-1779). Conversely, SoxS is able to confer a Mar phenotype via activation of genes that are under the control of MarA (Ariza, R. R., Cohen, S. P., Bachbawat, N., Levy, S. B. & Demple, B. (1994) J. Bacteriol. 176, 143-148, Greenberg, J. T., Chou, J. H., Monach, P. A. & Demple, B. (1991) J. Bacteriol. 173, 4433-4439). Genes known to be regulated directly or indirectly by both the MarA and SoxS regulators include zwf; fpr, fumC., micF, nfo, inaA, soda and acrA (Ariza, R. R., Cohen, S. P., Bachbawat, N., Levy, S. B. & Demple, B. (1994) J. Bacteriol. 176, 143-148, Greenberg, J. T., Chou, J. H., Monach, P. A. & Demple, B. (1991) J. Bacteriol. 173, 4433-4439, Jair, K.-W., Martin, R. G., Rosner, J. L., Fujita, N., Ishihama, A. & Wolf, J. R. E. (1995) J. Bacteriol 177, 7100-7104, Rosner, J. L. & Slonczewski, J. L. (1994) J. Bacteriol. 176, 6262-6269, Liochev, S. 1. & Fridovich, I. (1992) Proc. Natl. Acad. Sci. USA 89, 5892-5896, Ma, D., Alberti, M., Lynch, C., Nikaido, H. & Hearst, J. E. (1996) Mol. Microbiol. 19, 101-112). The positive regulation of zwf fumC, acrA, inaA and sodA by mar, and also the down-regulation of ompF is confirmed by these results. However, although binding of MarA to nfo and fpr was shown in cell-free studies (Jair, K.-W., Martin, R. G., Rosner, J. L., Fujita, N., Ishihama, A. & Wolf, J. R. E. (1995) J. Bacteriol 177, 7100-7104), no significant change in expression of these two genes was detected using the experimental conditions employed here.

[0327] Other findings revealed further overlap between the mar and soxRS regulons. The levels of aconitase (acnA), GTP cyclohydrolase II (ribA) genes, and the major oxygen insensitive nitroreductase (nfsA/mdaA), previously known to be under the control of soxRS (Gruer, M. J. & Guest, J. R. (1994) Microbiology 140, 2531-2541, Koh, Y. S., Chung, W-H., Lee, J.-H. & Roe, J.-H. (1999) Mol. Gen. Cent., 374-380, Liochev, S.1., Hausladen, A. & Fridovich, I. (1999) Proc. Natl. Acad. Sci. USA 96, 3537-3539), were observed to be increased in mar-expressing strains (Table 3). While NfsA was shown to be the major isoenzyme affected by paraquat, the oxygen sensitive NAD(P)H nitroreductase B, nfnB (also designated nfsB), was shown to be slightly induced (Liochev, S.1., Hausladen, A. & Fridovich, I. (1999) Proc. Natl. Acad. Sci. USA 96, 3537-3539). nfnB, like nfsA, is under the positive control of mar (Table 3).

[0328] nfsA was initially designated mdaA (modulator of drug activity), as one of two genes associated with bacterial resistance to tumoricidal compounds (Chatterjee, P. K. & Sternberg, N. L. (1995) Proc. Natl. Acad. Sci. USA 92, 8950-8954). The other gene, designated mdaB, was also found to be affected by mar (Table 3). Information about mdaB is very limited, and its function remains unknown. These findings provide suggestive evidence for a putative physiological role in protection against environmental stresses.

[0329] The exact mechanisms for the overlapping regulation by MarA and SoxS are still poorly understood. Multiple antibiotic resistance encoded by the soxRS locus appeared partly dependent on an intact mar locus; strains overexpressing SoxS showed increased levels of mar RAB transcription (Miller, P. F., Gambino, L. F., Sulavik, M. C. & Gracheck, S. J. (1994) Antimicrob. Agents Chemother. 38, 1773-1779). On the other hand, other work showed that regulation of some genes by mar and by soxRS can occur through independent pathways, e.g. inaA (Rosner, J. L. & Slonczewski, J. L. (1994) J. Bacteriol. 176, 6262-6269). An effect of mar on soxRS has not been detected and no up-regulation of soxS expression by mar was observed. Therefore, MarA appears to operate independently of SoxS.

[0330] Rob, a MarA/SoxS homologue, is also able to bind to promoters of genes belonging to the mar-regulon and overexpression of this protein leads to multiple antibiotic resistance and organic solvent tolerance in E. coli (Ariza, R. R., Li, Z., Ringstad, N. & Demple, B. (1995) J. Bacteriol. 177, 1655-1661, Jair, K. W., Yu, X., Skarstad, K., Thony, B., Fujita, N., Ishihama, A. & Wolf, R. E. J. (1996) J. Bacteriol. 178, 2507-2513). No substantial change in expression of rob by MarA was found.

### EXAMPLE 4

[0331] mar regulation of operons and co-transcribed units. Some of the mar-regulated genes were clustered in discrete regions, as part of documented or predicted operons (Blattner, F. R., Plunkett, G. I. I. I., Bloch, C. A., Pema, N., Burland, V., Riley, M., Collado-Vides, J., Glasner, J. D., Rode, C. K. M., G. F., Gregor, J., Davis, N. W., Kirkpatrick, H. A., Goeden, M. A., Rose, D. J., Mau, B. & Shao, Y. (1997) Science 277, 1453-1462) (FIG. 2). Interestingly, considerable variability in the levels of expression of different genes from the same operon was observed, and therefore only some of these genes were eligible for listing in Table 3. For example, the fold increase in expression of the three genes in the tryptophanase operon (tnaLAB; 83.8 min) was 1.7 for tnaL and 8.1 for tnaA (averaged values), while tnaB was unclear; it gave background values in one experiment, but was clearly up-regulated in the other two experiments.

[0332] Differential expression of genes within mar-regulated operons could arise as result of other factors besides regulation of transcriptional initiation, e.g. differences in mRNA stability or the presence of regulatory secondary structures in the intercistronic regions of the operon. For example, the β-methylgalactoside (mgl) transport operon is composed of three Orfs, mglBAC. Northern analysis showed the presence of two transcripts, a polycistronic mglBAC mRNA and a smaller transcript which corresponds to the first gene in the operon, mglB (Hogg, R. W., Voelker, C. & von Carlowitz, I. (1991) Mol Cen. Genet. 229, 453-459). This finding was suggested to result from 3′-5′ degradation of the larger mRNA, and from protection of the smaller transcript against nucleases by a repetitive extragenic palindrome sequence located at its 3′ end. In agreement, these findings showed the smaller transcript at a much higher level than the larger one (FIG. 3). In FIG. 3, eight genes up-regulated by mar: acnA, gshB, hemB, mdaA, tpx, mglB, nfnB and yadG, and 2 genes down-regulated by mar: aceE and ndh, were selected from those listed in Table 3. Samples were prepared and run in duplicate from mar-expressing (mar⁺) and mar-deleted (Δmar) cells. RNA samples were transferred to nylon membranes and hybridized to ³²P-labeled PCR amplified probes of the genes in study

[0333] The only members of the mar regulon which appear to have a paralog in the E. coli genome are acrA, pflB, ompF, marA and mtr (http:/www.genetics.wisc.edu/). However, with the possible exception of mtr vs. tnaB, none of the paralogs for these genes was identified as being regulated by mar, and therefore artifacts of cross-hybridization with other genes sharing substantial sequence homology (Richmond, C. S., Glasner, J. D., Mau, R., Jin, H. & Blattner, F. R. (1999) Nucleic Acids Res. 27, 38213835) do not appear to account for the observed findings.

[0334] Mar regulation of neighboring genes which are not part of previously documented operons was also observed (Tables 3 and FIG. 2). Up-regulation of gshB (min 66.6) expression by mar was routinely observed; moreover, yggJ whose function remains unknown, and is located immediately upstream from gshB, and the Orf downstream from gshB, yqgE (b2948), were also up-regulated by MarA. There are only 13 bp between the end of yggJ and the beginning of gshB, and 37 bp between gshB and yqgE, which does not allow for the presence of promoter sequences in the respective intergenic regions. These results support the annotation of these three genes as a “predicted operon” (Blattner, F. R., Plunkett, G. I. I. I., Bloch, C. A., Perna, N., Burland, V., Riley, M., Collado-Vides, J., Glasner, J. D., Rode, C. K. M., G. F., Gregor, J., Davis, N. W., Kirkpatrick, H. A., Goeden, M. A., Rose, D. J., Mau, B. & Shao, Y. (1997) Science 277, 1453-1462).

[0335] Transcription of the gene ybjC, a small Orf immediately upstream from, nfsA, also seems to be up-regulated by MarA. A promoter sequence internal to ybjC and near its start codon has been proposed for nfsA (44). Thus, nfsA could be transcribed independently from this promoter but the resulting transcript would hybridize to both genes in the array. On the other hand, the E. coli genome sequence suggests that these two genes may form an operon (Blattner, F. R., Plunkett, G. 1.1. I., Bloch, C. A., Perna, N., Burland, V., Riley, M., Collado-Vides, J., Glasner, J. D., Rode, C. K. M., G. F., Gregor, J., Davis, N. W., Kirkpatrick, H. A., Goeden, M. A., Rose, D. J., Mau, B. & Shao, Y. (1997) Science 277, 1453-1462). The two genes downstream from nfsA, rimK and b0853, are also up regulated by MarA. A putative transcriptional terminator has been identified in the intergenic region of nfsA and rimK (Zenno, S., Koike, H., Kumar, A. N., Jayarman, R., Tanokura, M. & Saigo, K. (1996) J. Bacteriol. 178, 4508-4514). Nevertheless, a certain level of read-through transcription would explain the co-expression of this complex of genes.

### EXAMPLE 5

[0336] Relationship between the mar regulon and iron. Some of the genes regulated by MarA are associated with iron, e.g. hemB, fumC, fecA, acnA, sodA. The products of some of the genes contain iron-sulfur clusters, which play a major role in sensing O₂ and iron, and in regulatory functions (Beinert, H. & Kiley, P. J. (1999) Curr. Opin. Chem. Biol. 3, 152-157) (Ding, H. & Demple, B. (1998) Biochemistry 37, 17280-17286). Iron is an essential element for the bacterial cell (Earhart, C. F. (1996) in Escherichia coli and Salmonella: Cellular and Molecular Biology, eds. Neidhardt, F. C. (ASM Press, Washington, D.C.), pp. 1075-1090) and iron acquisition from the host is important in bacterial pathogenesis (Litwin, C. M. & Calderwood, S. B. (1993) Clin. Microbiol. Rev. 6, 137-149)(Mahan, M. J., Slauch, J. M. & Mekalanos, J. J. (1996) in Escherichia coli and Salmonella. Cellular and Molecular Biology, eds. Neidhardt, F. C. (ASM Press, Washington, D.C.), pp. 2803-2815). However, iron can also be harmful to the bacterial cell as it catalyzes the production of hydroxyl ions via the Fenton reaction, which may damage all cellular components and even lead to cell death (Zheng, M., Doan, B., Schneider, T. D. & Storz, G. (1999) J. Bacteriol. 181, 4639-4643).

[0337] Some genes known to be regulated by Fur (ferric uptake regulator), are also responsive to SoxS, MarA and other regulators e.g. acnA and soda (Cunningham, L., Gruer, M. J. & Guest, J. R. (1997) Microbiology 143, 3795-805) (Storz, G. & Imlay, J. A. (1999) Curr. Opin. Microbiol. 2, 188-194). This co-regulation would allow the cell to deal with the iron-associated oxidative stress and suggest a role for mar in bacterial pathogenesis.

### EXAMPLE 6

[0338] Northern blot analysis of selected genes. Ten newly identified mar-regulated genes, whose expression was either induced (tpx, acnA, mglB, mdaA, gshB, hemB, yadG and nfnB), or repressed (aceE and ndh) in the macroarrays were confirmed by Northern blot analysis. This showed changes in the expression of mono or polycistronic transcripts associated with the genes (FIG. 3). The magnitude of these changes, not unexpectedly, differed somewhat from that obtained for the macroarrays. Regulation of gshB, mdaA and aceE genes involved alteration in the levels of multiple transcripts as expected based on reported or predicted involvement of these genes in polycistronic elements (Blattner, F. R., Plunkett, G. I. I. I., Bloch, C. A., Perna, N., Burland, V., Riley, M., Collado-Vides, J., Glasner, J. D., Rode, C. K. M., G. F., Gregor, J., Davis, N. W., Kirkpatrick, H. A., Goeden, M. A., Rose, D. J., Mau, B. & Shao, Y. (1997) Science 277, 1453-1462), (Spencer, M. E. & Guest, J. R. (1985) Mol. Cen. Genet. 200, 145-154), (Quail, M. A., Ilaydon, D. J. & Guest, J. R. (1994) Mol. Microbiol. 12, 95-104).

[0339] The transcriptional activator MarA may control the expression of genes directly or indirectly. It could activate intermediate activator or inhibitor regulatory proteins which then could up- or down-regulate the expression of other genes in the regulon. A case in point is the mar-regulation of ompF mentioned earlier (Cohen, S. P., McMurry, L. M. & Levy, S. B. (1988) J. Bacteriol. 170, 5416-5422). MarA activates micF, an antisense RNA which negatively affects the translation of ompF, leading to decreased outer membrane porin OmpF (Cohen, S. P., Hachler, H. & Levy, S. B. (1993) J. Bacteriol. 175, 1484-1492, Cohen, S. P., McMurry, L. M., I-looper, D. C., Wolfson, J. S. & Levy, S. B. (1989) Antimicrob. Agents Chemother. 33, 1318-1325). Furthermore, transcriptional activators can act also as repressor proteins, depending on the position of the regulator binding site at the exclusive zone of repression (Gralla, J. D. & Collado-Vides, J. (1996) in Escherichia coli and Salmonella. Cellular and MolecularBiology, eds. Neidhardt, F. C. (ASM Press, Washington, D.C.), pp. 1232-1245).

[0340] Only those genes whose expression trends were consistent in three experiments are reported here. It is therefore likely that the size of the mar regulon is under estimated. Some of the genes containing putative marboxes in their promoter regions (Martin, R. G., Gillette, W. K., Rhee, S. & Rosner, J. L. (1999) Mol. Microbiol. 34, 431-441) were not shown under the conditions used here to be part of the mar regulon. Moreover, a large number of genes was expressed at background level or responded to mar expression with small changes that were below the threshold applied in this study and therefore were not included. Under a different set of experimental conditions, such as using cells in a different stage of the growth phase, or grown in different media, it is possible that the magnitude of these changes will increase, or new genes will be affected, justifying inclusion in the mar regulon. Certainly small and transient changes in gene expression could have important implications in the cell's response to external stresses. Differences observed in global expression analysis between experiments have been seen and extensively addressed by other authors (Richmond, C. S., Glasner, J. D., Mau, R., Jin, H. & Blattner, F. R. (1999) Nucleic Acids Res. 27, 38213835) (Tao, H., Bausch, C., Richmond, C., Blattner, F. R. & Conway, T. (1999) J. Bacteriol. 181, 6425-6440). Among other factors the authors observed that the signal intensity of some genes was significantly different between experiments when using different batches of RNA. This problem was addressed in part by performing the study in triplicate. Trends detected by the gene array method must, therefore, be analyzed by other available molecular and biochemical techniques, such as Northern blot analysis and promoter fusion studies.

TABLE 3
Genes identified as part of the mar regulon using the E. coli Panorama
gene arrays.

| Gene name | Product* | MarA regulation |
|---|---|---|
| | Up-regulated genes | |
| acnA | Aconitate hydrase 1 | 2.7/5.9 |
| acrA | Acridine efflux pump | 1.9/2.3 |
| aldA | Aldehyde dyhydrogenase, NAD-linked | 7.4/3.2 |
| b0447 | Putative LRP-like transcriptional | 3.5/4.4 |
| | regulator | |
| b0853 | Putative sensory transduction regulator | 1.4/4.2 |
| b1448 | Putative resistance protein | 1.8/2.3 |
| b2889 | Putative enzyme | 2.5/5.6 |
| b2948 | Orf; hypothetical protein | 1.4/2.5 |
| cobU | Cobinamide kinase/cobinamide | 1.6/2.2 |
| | phosphate guanylytransferase | |
| fumC | Fumarase C = fumarase hydratase Class | 2.5/2.9 |
| | II; isoenzyme | |
| galK | galactokinase | 1.5/2.0 |
| galT | Galactose-1-phosphate | 2.5/2.4 |
| | uridylyltransferase | |
| gatA | Galactitol-specific enzyme IIA of | 2.0/1.8 |
| | phosphotransferase system | |
| gatC | PTS system galactitol-specific enzyme | 3.4/1.6 |
| | IIC | |
| gltA | Citrate synthase | 2.1/1.9 |
| gshB | Glutathione synthetase | 3.5/5.7 |
| hemB | 5-aimnolevulinate | 5.7/5.1 |
| | dehydratase = porphobilinogen synthase | |
| inaA | pH-inducible protein involved in stress | 5.0/20.2 |
| | response | |
| map | Methionine aminopeptidase | 1.7/2.1 |
| marA | Multiple antibiotic resistance; | 24.0/46.6 |
| | transcriptional activator of defense | |
| | systems | |
| marB | Multiple antibiotic resistance protein | 7.5/16.3 |
| marR | Multiple antibiotic resistance protein; | 15.9/46.3 |
| | repressor of mar operon | |
| mdaA | Modulator of drug resistance A | 3.8/8.2 |
| mdaB | Modulator of drug resistance B | 5.5/8.2 |
| mglB | Galactose-binding transport protein; | 5.3/2.6 |
| | receptor for galactose taxis | |
| mtr | Tryptophan-specific transport protein | 1.3/2.2 |
| nfnB | Oxygen-insensitive NAD(P)H | 12.4/20.1 |
| | nitroreductase | |
| ompX | Outer membrane protein X | 1.6/2.1 |
| pflB | Formate acetyltransferase 1 | 2.1/2.2 |
| pgi | Glucose-6-phosphate isomerase | 2.4/2.1 |
| ribA | GTP cyclohydrolase II | 1.1/2.2 |
| ribD | Bifunctional pyrimidine | 1.7/2.5 |
| | deaminase/reductase in pathway of | |
| | riboflavin synthesis | |
| rimK | Ribosomal protein S6 modification | 1.6/3.0 |
| | protein | |
| sodA | Superoxide dismutase, manganese | 7.0/4.6 |
| slA_2 | PTS system, glucitol/sorbitol-specific | 3.0/2.0 |
| | IIB component and second of two IIC | |
| | component | |
| tnaA | Tryptophanase | 7.9/8.4 |
| tnaL | Tryptophanase leader peptide | 1.3/2.1 |
| tolC | Outer membrane channel; specific | 3.1/2.8 |
| | tolerance to colicin E1; segregation of | |
| | daughter chromosomes | |
| tpx | Thiol peroxidase | 2.1/1.6 |
| yadG | Putative ATP-binding component of a | 9.2/11.2 |
| | transport system | |
| yadH | Orf; hypothetical protein | 1.9/2.7 |
| ybjC | Orf, hypothetical protein | 6.7/17.4 |
| ydeA | Putative resistance/regulatory protein | 1.9/3.9 |
| yfaE | Orf, hypothetical protein | 2.5/5.9 |
| yggJ | Orf, hypothetical protein | 3.1/4.2 |
| yhbW | Putative enzyme | 10.6/6.5 |
| zwf | Glucose-6-phosphate dehydrogenase | 2.7/1.8 |
| | Down-regulated genes | |
| accB | Acetyl-CoA carboxylase, BCCP | 2.2/2.0 |
| | subunit; carrier of biotin | |
| aceE | Pyruvate dehydrogenase | 6.1/5.2 |
| | (decarboxylase component) | |
| aceF | Pyruvate dehydrogenase (dihydro | 5.1/4.1 |
| | lipoltransacetylase component) | |
| ackA | Acetate kinase | 1.8/2.6 |
| b0357 | Putative alpha helix chain | 3.2/2.2 |
| b2530 | Putative aminotransferase | 1.2/2.3 |
| b3469 | Zinc-transporting ATPase | 1.6/2.2 |
| fabB | 3-oxoacyl-[acyl-carrier-protein] | 2.6/3.1 |
| | synthase I | |
| fecA | citrate-dependent iron transport, Outer | 2.5/2.8 |
| | membrane receptor | |
| glpD | Sn-glycerol-3-phosphate | 1.4/2.1 |
| | dehydrogenase (aerobic) | |
| guaB | IMP dehydrogenase | 2.9/2.3 |
| ndh | Respiratory NADH dehydrogenase | 5.8/3.8 |
| ompF | Outer membrane protein 1a (Ia; b; F) | 2.7/3.0 |
| purA | Adenylosuccinate synthetase | 2.1/2.1 |
| rplE | 50S ribosomal subunit protein L5 | 3.5/2.0 |

*Information about individual genes was obtained through the E. coli K-12 genome project Web page (http://www.genetics.wisc.edu/). mar regulation corresponds to ratios of gene expression between experimental and control samples for the up-regulated and the opposite for the down-regulated genes, obtained from two independent experiments.

Equivalents

[0342] Those skilled in the art will recognize, or be able to ascertain using no more than routine experimentation, numerous equivalents to the specific polypeptides, nucleic acids, methods, assays and reagents described herein. Such equivalents are considered to be within the scope of this invention and are covered by the following claims.

1. A method for identifying compounds that modulate an NIMR polypeptide activity comprising:
contacting an NIMR polypeptide with a test compound under conditions which allow interaction of the compound with the polypeptide;
determining the ability of the test compound to modulate the activity of an NIMR polypeptide; and
selecting those compounds that modulate the activity of the NIMR polypeptide to thereby identify compounds that modulate NIMR polypeptide activity.

2. The method of claim 1, wherein the NIMR polypeptide is selected from the group consisting of: b0357, b0447, b0853, b1448, b2530, b2889, b2948, b3469, mdaB, yadG, yadH, ybjC, yfaE, yggJ, and yhbW.

3. The method of claim 1, wherein the NIMR polypeptide activity comprises promoting the ability of a microbe to resist an environmental challenge.

4. The method of claim 3, wherein the NIMR polypeptide is selected from the group consisting of: aceG, ackA, aldA, cobU, fabB, fecA, galK, galT, gatA, gatC, glpD, gltA, gshB, guaB, hemB, map, mglB, mtr, ndh, nfnB, pflB, pgi, purA, ribD, rimK, rplE, srlA_{—}2, tnaA, tnaL, tpx, acnA, mdaA, ribA, and ydeA.

5. The method of claim 1, wherein the NIMR polypeptide activity comprises promotion of microbial virulence.

6. The method of claim 5, wherein the NIMR polypeptide is selected from the group consisting of: aceG, ackA, aldA, cobU, fabB, fecA, galK, galT, gatA, gatC, glpD, gltA, gshB, guaB, hemB, map, mglB, mtr, ndh, nfnB, pflB, pgi, purA, ribD, rimK, rplE, srlA_{—}2, tnaA, tnaL, tpx, acnA, mdaA, ribA, and ydeA.

7. The method of any of claims 1, 3, or 5 wherein said step of determining comprises measuring the efflux of the test compound or a marker compound from the cell.

8. The method of any of claims 1, 3, or 5 wherein said step of determining comprises measuring the ability of the microbe to grow or remain viable in the presence of the environmental challenge.

9. The method of any of claims 1, 3, or 5 wherein the NIMR polypeptide is present in a microbial cell.

10. The method of claim 9, wherein the NIMR polypeptide is heterologous to the cell in which it is present.

11. A method for identifying compounds that modulate an NIMR polypeptide activity comprising:
contacting an NIMR polypeptide with a test compound under conditions which allow interaction of the compound with the polypeptide;
determining the ability of the test compound to modulate the expression of an NIMR polypeptide; and
selecting those compounds that modulate the expression of the NIMR polypeptide to thereby identify compounds that modulate NIMR polypeptide activity.

12. The method of claim 11, wherein the NIMR polypeptide is selected from the group consisting of: b0357, b0447, b0853, b1448, b2530, b2889, b2948, b3469, mdaB, yadG, yadH, ybjC, yfaE, yggJ, and yhbW.

13. The method of claim 11, wherein the NIMR polypeptide is selected from the group consisting of: aceG, accB, acef, ackA, aldA, cob U, fabB, feca, galk, galt gatA, gatC, glpD, gltA, gshB, guaB, hemB, map, mglB, mtr, ndh, nfnb, pflB, pgi, purA, ribD, rimK, rplE, srlA_{—}2, tnaA, tnaL, tpx, acnA, mdaA, ribA, and ydeA.

14. The method of any one of claims 12 or 13, wherein the step of measuring comprises measuring the amount of RNA produced by the cell.

15. The method of any one of claims 12 or 13, wherein the step of measuring comprises measuring the amount or activity of a reporter gene product produced by the cell.

16. The method of claim 15 wherein the step of measuring comprises detecting the ability of an antibody to bind to the reporter gene product.

17. The method of any of claims 1, 3, or 5 wherein the NIMR polypeptide is present in a cell free system.

18. The method of claim 17, wherein the step of determining comprises measuring the ability of the compound to bind to the NIMR polypeptide.

19. A method for decreasing the virulence of a microbe comprising exposing the microbe to an environmental challenge and to an agent that modulates the activity of an NIMR polypeptide.

20. A method for reducing the marA mediated transcription of an NIMR gene comprising exposing the microbe to an environmental challenge and to an agent that modulates the activity of an NIMR polypeptide.

21. A method for identifying compounds that modulate activity of an NIMR polypeptide in a microbe comprising:
contacting an isolated NIMR nucleic acid molecule with a test compound under conditions which allow interaction of the compound with the nucleic acid molecule;
determining the ability of the test compound to bind to the isolated NIMR nucleic acid molecule; and
selecting those compounds that bind to the NIMR nucleic acid molecule to thereby identify compounds that modulate activity of an NIMR polypeptide.

22. The method of claim 21, wherein the NIMR polypeptide is selected from the group consisting of: b0357, b0447, b0853, b1448, b2530, b2889, b2948, b3469, mdaB, yadG, yadH, ybjC, yfaE, yggJ, and yhbW.

23. The method of claim 21, wherein the NIMR polypeptide activity comprises promoting the ability of a microbe to resist an environmental challenge.

24. The method of claim 22, wherein the NIMR polypeptide is selected from the group consisting of: accB, aceF, aceG, acka, aldA, cobU, fabB, feca, galK, galt, gatA, gatC, glpD, gltA, gshB, guaB, hemB, map, mglB, mtr, ndh, nfnB, pflB, pgi, purA, ribD; rimK, rplE, srlA_{—}2, tnaA, tnaL, tpx, acnA, mdaA, ribA, and ydeA.

25. The method of claim 19, wherein the NIMR polypeptide activity comprises promotion of the virulence of a microbe.

26. The method of claim 25, wherein the NIMR polypeptide is selected from the group consisting of: aceG, ackA, aldA, cobU, fabB, fecA, galK, galt, gatA, gatC, glpD, gltA, gshB, guaB, hemB, map, mglB, mtr, ndh, nfnB, pflB, pgi, purA, ribD, rimK, rplE, srlA_{—}2, tnaA, tnaL, tpx, acna, mdaA, ribA, and ydeA.

27. The method of claim 21, wherein the environmental challenge is an antibiotic compound.

28. The method of claim 21, wherein the environmental challenge is non-antibiotic compound.

29. The method of claim 28, wherein the non-antibiotic compound is a candidate disinfectant or antiseptic compound.

30. A vaccine comprising at least one NIMR nucleic acid molecule or an NIMR polypeptide and a pharmaceutically acceptable carrier.

31. A composition comprising at least one compound that modulates the activity of an NIMR polypeptide and at least one antibiotic.

32. A composition comprising at least one compound that modulates the activity of an NIMR polypeptide and at least one non-antibiotic compound.

33. A method for reducing the virulence of a microbe in a subject suffering from a microbial infection comprising administering at least one NIMR modulating agent to the subject such that the virulence of the microbe is reduced.

34. A method for treating a microbial infection in a subject comprising administering at least one NIMR modulating agent to the subject such that the infection is treated.

35. A method for reducing the infectivity of a microbe on a surface comprising contacting the microbe with at least one NIMR modulating agent such that the infectivity of the microbe is reduced.

36. The method of any one of claims 33, 34, or 35, wherein the microbe is a gram positive bacteria.

37. The method of any one of claims 33, 34, or 35, wherein the microbe is a gram negative bacteria.

38. The method of any one of claims 33, 34, or 35, wherein the microbe is an acid fast bacteria.

The application's sequence listing, which the Patent Office published only in electronic form, follows.

SEQUENCE LISTING (98 sequences)

SEQ ID NO: 1 - DNA, 14000 bp, Escherichia coli
  CDS (9174)..(9644)
cactccttgtctgctaaaaatgtgactcaaaaaccctttgccggatggcggcccagcatctgtttacatcattacgacgtcaaactgctcctggttatagagcggttcaatttgtactttaacctgtttgccaacgaaaatttccacttccgccagcgagtgtgactcttcgcctttcaaggcttcagctactgccggagaagcatagaccaggaaacggtcggagtcgtaagcatggtggacacgaacaatctcgcgcatgatttcatagcataccgtttccacggttttcaccgttccgcgaccgtggcaggttgggcattcgttacacagtacgtgctcaatgctttcgcgggtgcgtttacgcgtcatctccaccagccccagcgccgaaaaaccattaacgctggttttcacccggtctttgctcaacgcctgctccagcgagtgcagcactcggcggcggtgatcttcattattcatatcgatgaaatcaataatgataatcccgcccagattacgcaaccgtaactggcgagcgatagcctgcgtcgcttcaatattggtattgaaaatggtgtcgtccagattgcgatgaccgacaaacgctccggtattgatgtccacggtggtcatcgcttcggtctggtcgataatgagataaccaccggatttcagttctactttgcgttccagcgctcgctggatttcgttttcgacatcaaagagatcgaaaatcggctggcgtcctgtgtaatgctccagcttgcttgtcatctcgggaatgtactccgaggtgaactcaagtaacgcttcgtaagtcaggcgtgagtcaacgcgaatgcggtccagttcggcatcggcgaaatcacgcagaacacgctgcgccagcgccagttcgccgtacagctgataacgggtctgcgggcgttttttacgctccataactttggtccagacgcgtttcagataagcggcatcggaggccagttcagcctcgccaaccccttccgctgcggtacggatgataaacccgccctgctcgtcgcaatactctgcgaccacttttttcaggcgttcacgttctgattcgctttcaatacgttgggaaaccccaacgtgagaagcccctggcataaacaccagatagcgagaagggagcgtgatatcggtggtcaggcgcgcacctttagtgccaagcggatctttcaccacctgcaccatcagatcttgcccctgacgaaccagttccgagatgtcgcgcaccgtgaattgcttttgttcttcacccgccacacattcggtgtgcggcatgatgtcggatgcatgaagaaacgcggctttatccagcccaatatctacaaaagccgcctgcatacccggaagtacacgacttacacgacccttgtagatattgcctactattccgcgtcgcgcctcacgttcaatatgaatttcctgcagaataccgccatcaatatacgccactcgcgtttccgaaggcgttacgtttactaacaattcagccgtcatgtttatcccttttctcacgcagtgcgttaaaattacttaataattcatacgtttcaaccagcggtaagccgactacggcgtgatagctgccatttatcttcctgacaaaacagccacccagcccctgaataccgtatgcacctgctttatctaacggttcatcgctggcgacatagcccgcgatgtcttcgtctgttaacgttctgaaagtcacatcggtgaccaccaggcaatcgagaatgtgctggctgtcggccaacgccactgctgtcatcacctgatgggtctgacccgataatttgcgcaacatctgcgccgcatgctctgcgtcgcgcggtttctccagcacttctccgttcaggataacgatagtatccgcacccagcaccgggagatccttcgccgtttgcgcgacacctgcccgtgctttctcgcgcgccagacgcacaacatactgctgcgcgctctcctgcggctgacgctgctcctcaatgcccgtaacaatacgttcaaaggtcacgccaagttgcgcaagtaactcctgacgacgcggagaaccggaagctaaatacagagaagtcatagaaacctttattgcactgcaaactgctgacggactttgcgcatcagcaagaaaatccacggccagagcaccccattgactacactactccagaacacttccggtctgaaagagacgttaatcactaaaaactctgcccagaaaacaataatatccaccaccagcgaaagcaacatgacgaccagcgcctgctgccataatgcgaggttgcggaaaagctggtatttcagcgccaccaggtaagcaatgatgctcatcgccaatacgcgtacgccaagcgtcgagccgctgatcagatccagtatggcacccatcacaaaacctgtgcccacatttacgcgatgaggcaaggccaggatccaatacaacaagatgagtaacacccagtttggccggaaaacaatcaggttatccggccagggcatgatttgcagcaacagcgcaatgaggaaagagagccagattacccagcgtccctggctacgatagctcgccactattgccctcccggcgcacgcgcaggcggttgagcaccactttgcggcggcgtagccctttgtggagagcgattagcagcaggctgtgtcggcgcagcaggcgcagtagctgcatttcctgtcgccggttgctgcggagtcggctgagcgatccccgttgccggttcaggtaactttggccccatcgcgtctggcgaaggcaatacctgcggcatcatctgcatcagacgttcattagcaacacgatgcacctcttccggcgtcatcgggttagcgccgttacgatctgccccccacagcagcagcagataacgcaaacgttgcagccctgcagtcggacgcgcctgaatcacagtataagcgcgctgggtatcgagttttacggaagagacaaccgcgaccggatagccttccgggaaacgaccgcccagaccggaagtcaccagcacatcaccaacacgaatatccgtattcgccggcagatgctcaagctgcaaatcatccgtacaaccgttaccggctgcaattacgcggatatcgttgcgcagcacctggattggcagcgcgtgggtcgcatcacaaatcagcagcacgcgactggtcagtttagcgacggccaccacctgaccaacaacacctttgtcgctgatgaccggctggccttcataaacgccattaacgctacctttatcgataacaacttgatcgctataaggatcgttaaccgtggagataacctgagtcaccattttctgctcatcctgacgcagcggggaacccagcagctcgcgcagacgcgcgttctcctgtttgtattgtccaagcatcagcagttcactgtttttcagcaacagttcctgacgtaacgcccggttttcaagttctaattggtcacgcgaggccagcgtctgcgatacgccatccagcaattcacgaggagcattggaaacaaagtagaaaggactgacggcggtatccatataagtacggatttgactgaacgtccccaggcggctgtcggcaataataatgccgagcgccaccagcaccgccagaataaggcgaatctgtagcgacgggccacggctaaaaattggcttcataagttatgcgtattctcgtatcagaccaggcagggtaaacagacacttcccctgcctgcatccgattactcttcgctgaacaggtcgccgccgtgcatgtcgatcatttccagcgctttgccgccaccgcgcgccacacaggtcagcgggtcttcagcaacaacgactggaatgccggtttcttccattaacaaacggtcaaggttacgcagcagtgcgccaccaccggtgagcaccatgccgcgctcggagatgtcggaagccagttccggcgggcactgttccagtgcaaccattaccgcgctcacaataccggtcagcggttcctgcagtgcttcgaggatttcattggagttcagggtaaaaccgcgtggaacaccttctgccaggttacggccacgaacttcgatttcacggacttcatcgcccggataagccgaaccgatttcgtgcttgatacgttctgcggtggcttcaccgatcagagaaccgtaattacgacgcacatagttgatgatagcttcgtcgaaacggtcaccaccaatgcgcacagaagaggagtaaaccacaccgttcaaggagataacagcaacttcagtggtaccaccaccgatatcaaccaccatagaaccggtcgcttcagaaaccggcaggccagcaccaattgcggcagccatcggttcttcaatcaggaagacttcacgggcaccagcgccctgcgcggattcacgaattgcgcggcgttcaacctgggtcgcgccaaccggcacacaaaccagaacgcgcgggcttggacgcataaagctgttgctgtgcacttgtttgatgaagtgctggagcattttttcagtcacgaagaagtcggcgataacgccgtctttcattgggcgaatggcagcaatattgcccggcgtacggcccagcatctgcttcgcgtcatgacctactgcagctacgcttttcggtgaaccggcacgatcctgacgaatggccaccacggaaggctcattcaatacgatgccttgtccttttacataaatgagggtattcgcagtacccaggtcaatggacaagtcattggaaaacatgccacgaaattttttcaacatactaagggataatcctgaaagctggggcggaaaagaaaatccgcttactttaccaaccacacgcagcagcgacaaggcgcaaaaatcatctgctacggtgaaaattagtgcagttcgtttcctttgttacaaatctctgcctgagtccagaaaggcttaatgcatcagcagcattcctcgcctgtttgcaaccgcgtaaggtcattcatctgcatatgtgctgcaacaatctggcgagcagacaagcacactcccatgagacgcagcgcgcattattctacgtgaaaacggattaaacggcaggttaaaccgagtatctttgtgaatattttttcacgttagtatcaagtggctgtgaggacgcgaaaaaatccccttgcccgcctgtaacaccgcgctgaatcagggtctgccactcgcttcgcgaacgcacgccggtggcgtaaacctgggtgctggtcccggagcaggcttccaccaggctttgaaccagcagctggttctccgttcgcttctcaatgtttctgaccagccccggatggagcttgagtaactcaacattaagttctttgatccaactggtacttaccagcgtcaaaccagcctggttgacggctacccgtacccctaaagcattcactaaacgaataacaggttgtaaacgactgatatgttgacctacatcggcctctgcaagttcaataattatgcgttttcgttgtgatttttcacattgcattaacgtatcgcgcagccaacgctgaaaacgcgggcgaatcagcgactcaacggtaacctgaatcgccagattttcctctggccagtaacgcaatagtggaataagacggctgatttgcagacggtcatactcttccgataagccaaactgcaagaccatcggcatatactccgccgagctaacctcttcattaccatcgaagatgcggcacatgagttcgcgatgatgaacctgaccttcgcgagtaaccgccggtttttgataaaggcgcgggccgccgcgactgagcatttgctcgataagcgtacgccagcgaacattaccgcgtcctttttcaggcaacgagtcatcgtaaatagcccagctattgccgccctgcaatcccgcattacgcgtggcagactctgcatgttccattacctgctcggtatcctgaccactacgccaggcgcagataccaatgtggatcatatcgtcgcgatcgagcattttattgttcggcaaggtatcaacggctttgattaactgaccggcgatgctctctgcctcttttaacgtccggtgcggtaacagcgcagcaaaatcactgcggtggtaacgcgccagcagtgcgccagggtagcgcatcataaatgtcgacagcagattcgtcagagtgaagaactgttcttcaacctggctgtgcccccaggtatcgctcaacatattgaaatccggcagacgaatcatcatcacgatcccgtgggtacctactttctcctgatcttccagtaacgttgctaactgattatcgaaaaagagtcggttattgaggccggttttcacgtcctgggcggcataagagcggatcagcgtatcaagacggctgtgttgttcgcgtgcgttctgaatttcacgaagcagcgtatccagcgcactgctggttctgggcggccattcatagatggttcccaacacattagagccacgctcaccgtttaagatacgagtagcccgggtttccagcaattcttgcccggcaagttgccgttgtaaccagcgtaccgccaggaagagcataacaatgataaagccaatcgcccccgtgagcggcgcggtggtcatcaacgaatggaaatagttgcccatcggatcctgataaaccagacgcaacgacatccccggatgctttatcaacggaacgctcagttcgcgaaacagatcgctggagccaactggacgataactaccatttctggccagggtataaacctgtttatcaccatggagcaggtctacacgaacgatatctgccgacatcattaattcggtaatttgtggccttaatacgctgaagtcattcgacacaaggtgggtatcaatcgccgtcgccaccgcctgaacgcgatgactaaacttatactgaatggcgttgtagaaacttagcgaacagcccagcaaagtcacaaaaattgttaacccggtgagcagcgtaacaaaggccgaaaatttcgtcgttaatctcatccttgtgttaactccgatagtgaggaagcgggcatactagcaaatcagatttatctcgcaatttattgcgcttcatcggctttgcttttccattagcgagtatagtcttcagaaattattttccaatccatcatgcacatgaggaccacttatgcaggcgttacttttagaacagcaggacggcaaaactctcgcatcagtacagactctggacgaaagtcgcctgccggagggcgatgtcacggtcgatgttcactggtcgagcctgaactataaagatgcgctggcgattaccggtaagggaaaaatcatccgtaattttccgatgattcctgggatcgattttgccggaactgtacgcaccagcgaagatccgcgttttcatgccggtcaggaggtgttactcactggctggggcgttggtgaaaaccactggggtgggctggcggagcaggcgcgagtgaaaggtgactggctggttgccatgccgcaagggctggacgcgcgtaaagcaatgattatcggtactgccggttttaccgccatgctgtgtgtgatggcgctggaagatgccggtgttcgcccgcaggacggggagattgtcgtgacgggtgccagtggtggcgtcggcagtaccgccgtggcgctgctgcataagttgggttatcaggtcgttgccgtttccggtcgcgaaagtacccatgaatatctgaaaagtttaggtgctagccgtgttctccctcgtgatgagtttgccgaatcccgtcctctggaaaaacaagtctgggctggggcaattgacaccgttggcgacaaagtgctggcaaaagtgctggcgcaaatgaattacggcggctgcgtggcggcctgtggtctggcgggtggttttactctgccaaccacggtcatgccatttattctgcgtaatgtccgtttgcaaggggtggattcagtaatgacgccaccagaacgccgcgcacaagcctggcagcgactggtcgccgatttaccggaatcattctatacccaggcggcaaaagagatatctctgtcagaggcaccgaactttgccgaggccatcattaataaccagatccagggtcgcacgctggtgaaggttaactaaccatttagcagggaataataagagagggaactcattttgaaatcattattcaatcggttaacgggaaaagcggttagccggacagctttcgtcgaacaccttggtcaggaagttatacaacatcatccaaactggaaagtcatgatttcgactgaccacaaattgatgcgcattgatactccactaaacagctattattgatacgcctccgtcgcctgttaggtttatgttgctttgcctgggcgacgctacgcttagccccttacttatttctggtaccatggggtgaataatctgattttgtttgactacaaattaatcactcgaacctatttaatgctgagcattgtcaatcggttaattttgcgtgctttagcattcacatctatccagacgatgcagtgaaaattgggtaatccccagcaaccgctgcgtaatgtcgtctatcttgtcgcgatcctggcatccctacattatttgtggtctgtgaagattatctcattgcagcccctcatcttcgcagggctggcttttcagcttttcaccttacgttataagaagttccgtcgatgatggcgctaatttcgtgaattgtgcggcttgttgcaaattacacggtgttgaaggttatttacatgttagctgttgattatcttccctgataagaccagtatttagctgccaattgctacgaaatcgttataatgtgcgacctcgtcctccctgacgcagtttttgcgctgcggaaaaggtgacattggcgcaacgaaggtatattttgttttttgccggaggatagcagcagatcgctgcacaatgtccgtcaagtctaacattgacactctggggcaaaatagaccggcgtcccggcctgctggaatttatcgctatgcatacagctgtcggggcatacgctttacagacggcggtgaaacgcctgtcacaatcacactaaacaaagagtacggaacccactcatggatattcgtaagattaaaaaactgatcgagctggttgaagaatcaggcatctccgaactggaaatttctgaaggcgaagagtcagtacgcattagccgtgcagctcctgccgcaagtttccctgtgatgcaacaagcttacgctgcaccaatgatgcagcagccagctcaatctaacgcagccgctccggcgaccgttccttccatggaagcgccagcagcagcggaaatcagtggtcacatcgtacgttccccgatggttggtactttctaccgcaccccaagcccggacgcaaaagcgttcatcgaagtgggtcagaaagtcaacgtgggcgataccctgtgcatcgttgaagccatgaaaatgatgaaccagatcgaagcggacaaatccggtaccgtgaaagcaattctggtcgaaagtggacaaccggtagaatttgacgagccgctggtcgtcatcgagtaacgaggcgaacatgctggataaaattgttattgccaaccgcggcgagattgcattgcgtattcttcgtgcctgtaaagaactgggcatcaagactgtcgctgtgcactccagcgcggatcgcgatctaaaacacgtattactggcagatgaaacggtctgtattggccctgctccgtcagtaaaaagttatctgaacatcccggcaatcatcagcgccgctgaaatcaccggcgcagtagcaatccatccgggttacggcttcctctccgagaacgccaactttgccgagcaggttgaacgctccggctttatcttcattggcccgaaagcagaaaccattcgcctgatgggcgacaaagtatccgcaatcgcggcgatgaaaaaagcgggcgtcccttgcgtaccgggttctgacggcccgctgggcgacgatatggataaaaaccgtgccattgctaaacgcattggttatccggtgattatcaaagcctccggcggcggcggcggtcgcggtatgcgcgtagtgcgcggcgacgctgaactggcacaatccatctccatgacccgtgcggaagcgaaagctgctttcagcaacgatatggtttacatggagaaatacctggaaaatcctcgccacgtcgagattcaggtactggctgacggtcagggcaacgctatctatctggcggaacgtgactgctccatgcaacgccgccaccagaaagtggtcgaagaagcgccagcaccgggcattaccccggaactgcgtcgctacatcggcgaacgttgcgctaaagcgtgtgttgatatcggctatcgcggtgcaggtactttcgagttcctgttcgaaaacggcgagttctatttcatcgaaatgaacacccgtattcaggtagaacacccggttacagaaatgatcaccggcgttgacctgatcaaagaacagctgcgtatcgctgccggtcaaccgctgtcgatcaagcaagaagaagttcacgttcgcggccatgcggtggaatgtcgtatcaacgccgaagatccgaacaccttcctgccaagtccgggcaaaatcacccgtttccacgcacctggcggttttggcgtacgttgggagtctcatatctacgcgggctacaccgtaccgccgtactatgactcaatgatcggtaagctgatttgctacggtgaaaaccgtgacgtggcgattgcccgcatgaagaatgcgctgcaggagctgatcatcgacggtatcaaaaccaacgttgatctgcagatccgcatcatgaatgacgagaacttccagcatggtggcactaacatccactatctggagaaaaaactcggtcttcaggaaaaataagactgctaaagcgtcaaaaggccggattttccggccttttttattactggggatcgacaacccccataaggtacaatccccgctttcttcacccatcagggacaaaaaatggacactcgttttgttcaggcccataaagaggcgcgctgggcgctggggctgacccttttgtatctggcagtttggttagtagccgcttacttatctggcgttgcccccggttttaccggctttccgcgctggtttgagatggcctgcatcctgacgccgctgctgtttattggactgtgctgggcgatggtgaaatttatctatcgcgatatcccactggaggatgacgatgcagcttgaagtaattctaccgctggtcgcctatctggtggtggtgttcggtatctcggtttatgcgatgcgtaaacggagcaccggcaccttccttaatgagtatttcctcggcagccgctctatgggcggtattgtgctggcgatgacgctcaccgcgacctatatcagtgccagttcgtttatcggcgggccaggagctgcttataaatacgggctgggctgggtattgctggcgatgattcagcttcctgcagtctggctttcactcggtattctcggcaagaagtttgcgattcttgcgcgccgctacaatgcagtgacgctgaacgatatgctgtttgcccgctaccagagtcgtcttctggtgtggctggcgagtttgagtttgctggttgcgttcgttggtgcgatgaccgtgcagtttatcggcggtgcgcgcctgctggaaaccgcggcgggtattccttatgaaaccgggctgctgatttttggtatcagcattgcgttatataccgcctttggtggctttcgcgccagcgtgctgaacgacaccatgcaagggcttgtgatgctgattggcaccgttgtgctgcttattggcgtagtacatgccgctggcggcttaagtaacgcagtacagaccttgcaaaccatcgatccgcaactggttacgccacaaggcgctgacgatattctgtcgcctgcctttatgacgtcgttctgggtactggtgtgttttggcgtgattggcctgccgcatactgcggtgcgctgtatctcttataaagacagcaaagccgtacatcgggggatcatcatcggtacgattgtggtcgcaattctgatgttcggtatgcacctggccggagcgttaggtcgggcggtgatccccgatctcaccgtaccggacctggtgatcccaacgttaatggtaaaagtgctgccaccgtttgctgccgggatcttcctggctgcaccgatggctgcgatcatgtcgacaattaacgcccaactgctgcaaagttccgctacgatcattaaagatctctatctgaatatccgtccggatcaaatgcaaaacgagacgcgtctgaagcggatgtcggcggtaattacgttagttctcggcgcgttgctgctgcttgccgcctggaagccgccagaaatgatcatctggctgaatttgttggccttcggtgggctggaagccgttttcctgtggccgctggtgctgggtctttactgggaacgcgccaacgccaaaggcgcgctaagtgcgatgatcgttggcggcgtgctgtatgccgtactcgcgacgctgaatattcagtacctgggcttccaccctatcgtgccctcgttactactaagtttgctggctttcctggtcggaaaccgtttcggtacatccgtcccgcaagctaccgttttgactactgataaataaagagttttgccatgccttggatccaactgaaactgaacaccaccggcgcgaacgcggaagatcttagcgatgcgctgatggaagcgggtgccgtttctatcacttttcaggatacccacgatacgccagtatttgaaccgctgccgggcgaaacgcgcctgtggggcgacaccgatgtgattggtctgttcgacgctgaaaccgatatgaacgacgtggtggcgattctggaaaaccatccgctgctcggcgcaggcttcgcgcataaaatcgaacaactagaagataaagactgggagcgcgaatggatggataatttccacccgatgcgctttggtgaacgactgtggatctgccctagctggcgtgatgtgccggacgaaaacgccgtcaacgtgatgttagatccagggctggcgtttggtacgggtacccatccaaccacctctctgtgcctgcaatggctcgacagcctcgatttaaccggtaaaacagtcatcgactttggctgtggttccggcattctggcgatcgcggcgctgaaactgggtgcagcaaaagccattggtattgatatcgatccgcaggcgattcaggccagccgcgataacgccgaacgtaatggcgtttctgaccgtctggaactctacttaccgaaagatcagccagaagaaatgaaagccgacgtggtggtcgctaacatccttgcaggcccattacgtgaactggcaccgttaatcagcgtcctgccggtttcaggcggtttgctgggcctttccggtattctggcaagccaggcagagagcgtttgtgaagcttatgccgatagcttcgcactggacccggtcgtggaaaaagaagagtggtgccgtattaccggtcgtaagaattaaccttcgcatcgccgtagggtgacgcggggcgaagtgcgagcaagctcacaaaaggcacgtaaatttgccgattatttacgcaaatttgcgtgccaaaattttcattcataaagaaaaattgagaacttactcaaatttctttgagtgtaaattttagtcactattttctaatatgatgatttttatgagtaattatcgcaccacgctcattttaaatgcaattctttgatccatctcagaggattggtcaaagtttggcctttcatctcgtgcaaaaaatgcgtaatatacgccgccttgcagtcacagta

SEQ ID NO: 2 - protein, 156 aa, Escherichia coli
MDIRKIKKLIELVEESGISELEISEGEESVRISRAAPAASFPVMQQAYAAPMMQQPAQSNAAAPATVPSMEAPAAAEISGHIVRSPMVGTFYRTPSPDAKAFIEVGQKVNVGDTLCIVEAMKMMNQIEADKSGTVKAILVESGQPVEFDEPLVVIE

SEQ ID NO: 3 - DNA, 10157 bp, Escherichia coli
  CDS (5397)..(8060)
  CDS (8075)..(9967)
aaacgggaaagcagattccgaggttttttatttcgttgcagcgaaagacaagaaatttgcgaggcgttacgaagaaagttggggaaggggagattatccgcccgcgatggagcggataaatctgtcaactattagcgaaaacgcattgaaaggtcgagtgcttgtacgtgtttagttagcgcaccgacggagataaagtccacgcccgtttcggcaaattcacgcagtgttttgtcagtgacgttgccagacacttccagtagcgccttgccgttggtgcgtttgacggcttcgcgcatctgttctgtttcgaagttatccagcatgatgatatcggctcctgctttcagggcttcatcaagttcttccagattctctacttcgacttctactggcgcatccgggtgcagccaggacgctttttcgaccgcctggcgcactgagccggaggcaataatatggttttctttgatcaggaaggcatcagaaagccccagacggtgattcgctccgccgccgcaaagtaccgcgtatttcagagctgaacgcaggccgggtaaggttttgcgcgtatccaacaactgcgtgttggtgccttccagcaattcgacatagtggcgtaccttactggcaactcctgaaagggtttgcacaaaattaagcgcagtgcgttcgcccgttaacagcacgcgggatgggccttcaagttcgaacaaggattgattggcattgatgacatcgccgtcatccacatgccagattatggtgacatcgtcgcctgccagttgaataaacacctcttcaacccagcgtttgccgcaaaagacgccattctcgcgggtgatcaccgtggcatgagagcgagaattttccggtaaaagttttgccgtaatatcattgttggcatcgactgttccgcctaaatcttcccgcagcgcctgggccaccgcgccggggatatcgagattaatgcgttccagcagctcgtcacgtcgggtgtcagggttatagcggcgaggcggcatgttaaaactccagatagctaacgaatcataaggtagaaacatgctactctgaaccgggtattagcaccacatataaggagatcctgcatgttgttagaacaggggtggctggttggcgcgcgccgcgttccctcaccacattacgattgccgcccggatgacgaaacacccaccctgctggtggtgcacaatattagcctgccgccaggcgagtttggcggtccgtggatcgacgcattattcactggaactattgatccgcaggcacatcctttctttgctgagatcgcccatttgcgcgtctccgctcactgtttgattcgccgtgatggtgaaatagtccagtatgttcctttcgataaacgtgcatggcatgcgggagtctctcagtatcaggggcgcgaacgctgcaatgatttttctattgggattgagcttgaaggcaccgatacgctggcgtataccgatgcgcagtatcaacagcttgcggcggttacgcgggcactgattgattgctatccggatatcgctaaaaacatgacgggccattgtgatattgcgccggatcggaaaaccgatcccggtcctgcatttgattgggcacggtttcgtgtgctggtcagcaaggagacaacatgacgctatttacaaccttactggtgttaattttcgagcgcctgtttaagttgggcgagcactggcagcttgatcatcgtcttgaagcgttctttcggcgggtgaaacatttttctctcgggcgcacgttaggcatgaccattattgcgatgggcgtgacttttttactgttacgcgcattgcagggagtattgttcaacgttcccacgctactggtgtggctgctgattggtttgctgtgtattggcgcaggtaaagttcgtcttcattatcatgcttatctgacagctgcttcacgtaatgatagccatgcccgtgccacgatggctggcgaactcaccatgattcacggcgtcccggcaggctgcgacgaacgtgagtatttgcgtgagctgcaaaatgcattgctgtggattaactttcgtttttatcttgcaccgctgttctggctgattgtggggggaacctggggacccgttacgctgatggggtatgcgtttttgcgtgcatggcaatactggctggcgcgatatcagacgccgcatcatcgtttacagtccggcattgatgccgtgcttcatgtactggattgggtgccggttcgtcttgcgggtgtggtatatgccttgatcggtcatggtgagaaagcgttaccggcctggtttgcttcgctgggtgatttccatacttcgcagtatcaggtgttaacgcgtctggcgcagttctctctggcgcgtgaaccgcatgtcgataaggtggagacgccgaaggcagcggtttcaatggcgaagaaaacctcgttcgtggtcgtggtggtgattgcactactgacgatttacggggcgttggtgtaaagattattgccctcaccctgtacgggtgagggcgtagagagattaatgcgcttttacggctttggcggttttctctttaaacagatagccgatacctaacacgatcagccataccgggatcaggtataccgaaatcgccattcctggggtcatcagcataatcaccagtaccgccgccataaacagcaggcagatccagttacccagcggataaagcagagcagggaagcgagttaccacgccttgttcctgcttggcgcgacggaatttcatatgcgccaggctaatcatcgcccagttgattaccagtgcagataccaccagcgccattaacagtccgaaagcggactctggggcaaggtagttaatcagtacgcacaacgccgttaccagtgcagacaccagaatggtatttactggtacaccacgtttatcgacagacgccagcgcttttggcgcattaccctgttgtgccagaccaaacagcatacggctgttgcaatatacgcagctgttgtacacggagagcgccgcagtcagtaccacgatgttcagcgcattcgccacaaaggtatcgcctaactcgtggaagatcagcacaaacggactggtatcggcggtaacgcgggtccacggcatcagtgagagcagaacggctaacgaaccaatatagaaaatcaggatgcggtagataacctggttagttgctttcggtatactttgctccgggttatcagcttctgctgcggtgatccccaccagttccagaccaccgaacgagaacatgataatcgccatcatcatcaccagcccggtgaagccgtgcggcaggaaaccaccctgatcccacaggttgctaacggtcgcctgcgggccgccgttgccactgaatagcagccagccgccgaagatgatcatcgctaccaccgcgataactttgataatggcaaaccagaactccatctcgccaaacactttaacgttggtcaggttgatggcgttaatcaccacaaagaatacggcggcagaaacccaggtggggatttccggataccagaactgaatgtatttacccacggcagtcagctcagccatggcaactaaaacgtacagtacccagtagttccagccagaggcgaaaccggcaaaactgccccagtatttataagcaaagtggctaaaggagcctgcgacaggttcttcgaccaccatttcacccagctgacgcatgatcagaaaggcgataaaaccagcaatggcgtaacccaggataatccctggccctgcggactgtattacggaggcgctacccaggaataacccggtccctatcgcgccacccagcgcgataagctgaatatggcggtttttaaggccgcgctttagctgctcgccgtgctgttgaccttccatcatgaaacctcgtgcggtggttgtttttttgatctacgcagtgatgcgtgtgtaagtttgcaattccgtttgttgtattaatttgtttacatcaaagaagtttgaattgttacaaaaagacttccgtcagatcaagaataatggtatgcggcagcgaatgcacccgctttatgcatggttgaagatgagttgcttaaaaagaaaccgtttgtaaagctcagcctcaacccctctcaatatgtagaatgaatttaaattcgttttaattgaattaaaaatcacaaaattggtaagtgaatcggttcaattcggatttttatagtttaataatcgttaaaaaactcctttcctacgtaaagtctacatttgtgcatagttacaactttgaaacgttatatatgtcaagttgttaaaatgtgcacagtttcatgatttcaatcaaaacctgtatggacataaggtgaatactttgttactttagcgtcacagacatgaaattggtaagaccaattgacttcggcaagtggcttaagacaggaactcatggcctacagcaaaatccgccaaccaaaactctccgatgtgattgagcagcaactggagtttttgatcctcgaaggcactctccgcccgggcgaaaaactcccaccggaacgcgaactggcaaaacagtttgacgtctcccgtccctccttgcgtgaggcgattcaacgtctcgaagcgaagggcttgttgcttcgtcgccagggtggcggcacttttgtccagagcagcctatggcaaagcttcagcgatccgctggtggagctgctctccgaccatcctgagtcacagtatgacttgctcgaaacacgacacgccctggaaggtatcgccgcttattacgccgcgctgcgtagtaccgatgaagacaaggaacgcatccgtgaactccaccacgccatagagctggcgcagcagtctggcgatctggacgcggaatcaaacgccgtactccagtatcagattgccgtcaccgaagcggcccacaatgtggttctgcttcatctgctaaggtgtatggagccgatgttggcccagaatgtccgccagaacttcgaattgctctattcgcgtcgcgagatgctgccgctggtgagtagtcaccgcacccgcatatttgaagcgattatggccggtaagccggaagaagcgcgcgaagcatcgcatcgccatctggcctttatcgaagaaattttgctcgacagaagtcgtgaagagagccgccgtgagcgttctctgcgtcgtctggagcaacgaaagaattagtgatttttctggtaaaaattatccagaagatgttgtaaatcaagcgcatataaaagcgcggcaactaaacgtagaacctgtcttattgagctttccggcgagagttcaatgggacaggttccagaaaactcaacgttattagatagataaggaataacccatgtcagaacgtttcccaaatgacgtggatccgatcgaaactcgcgactggctccaggcgatcgaatcggtcatccgtgaagaaggtgttgagcgtgctcagtatctgatcgaccaactgcttgctgaagcccgcaaaggcggtgtaaacgtagccgcaggcacaggtatcagcaactacatcaacaccatccccgttgaagaacaaccggagtatccgggtaatctggaactggaacgccgtattcgttcagctatccgctggaacgccatcatgacggtgctgcgtgcgtcgaaaaaagacctcgaactgggcggccatatggcgtccttccagtcttccgcaaccatttatgatgtgtgctttaaccacttcttccgtgcacgcaacgagcaggatggcggcgacctggtttacttccagggccacatctccccgggcgtgtacgctcgtgctttcctggaaggtcgtctgactcaggagcagctggataacttccgtcaggaagttcacggcaatggcctctcttcctatccgcacccgaaactgatgccggaattctggcagttcccgaccgtatctatgggtctgggtccgattggtgctatttaccaggctaaattcctgaaatatctggaacaccgtggcctgaaagatacctctaaacaaaccgtttacgcgttcctcggtgacggtgaaatggacgaaccggaatccaaaggtgcgatcaccatcgctacccgtgaaaaactggataacctggtcttcgttatcaactgtaacctgcagcgtcttgacggcccggtcaccggtaacggcaagatcatcaacgaactggaaggcatcttcgaaggtgctggctggaacgtgatcaaagtgatgtggggtagccgttgggatgaactgctgcgtaaggataccagcggtaaactgatccagctgatgaacgaaaccgttgacggcgactaccagaccttcaaatcgaaagatggtgcgtacgttcgtgaacacttcttcggtaaatatcctgaaaccgcagcactggttgcagactggactgacgagcagatctgggcactgaaccgtggtggtcacgatccgaagaaaatctacgctgcattcaagaaagcgcaggaaaccaaaggcaaagcgacagtaatccttgctcataccattaaaggttacggcatgggcgacgcggctgaaggtaaaaacatcgcgcaccaggttaagaaaatgaacatggacggtgtgcgtcatatccgcgaccgtttcaatgtgccggtgtctgatgcagatatcgaaaaactgccgtacatcaccttcccggaaggttctgaagagcatacctatctgcacgctcagcgtcagaaactgcacggttatctgccaagccgtcagccgaacttcaccgagaagcttgagctgccgagcctgcaagacttcggcgcgctgttggaagagcagagcaaagagatctctaccactatcgctttcgttcgtgctctgaacgtgatgctgaagaacaagtcgatcaaagatcgtctggtaccgatcatcgccgacgaagcgcgtactttcggtatggaaggtctgttccgtcagattggtatttacagcccgaacggtcagcagtacaccccgcaggaccgcgagcaggttgcttactataaagaagacgagaaaggtcagattctgcaggaagggatcaacgagctgggcgcaggttgttcctggctggcagcggcgacctcttacagcaccaacaatctgccgatgatcccgttctacatctattactcgatgttcggcttccagcgtattggcgatctgtgctgggcggctggcgaccagcaagcgcgtggcttcctgatcggcggtacttccggtcgtaccaccctgaacggcgaaggtctgcagcacgaagatggtcacagccacattcagtcgctgactatcccgaactgtatctcttacgacccggcttacgcttacgaagttgctgtcatcatgcatgacggtctggagcgtatgtacggtgaaaaacaagagaacgtttactactacatcactacgctgaacgaaaactaccacatgccggcaatgccggaaggtgctgaggaaggtatccgtaaaggtatctacaaactcgaaactattgaaggtagcaaaggtaaagttcagctgctcggctccggttctatcctgcgtcacgtccgtgaagcagctgagatcctggcgaaagattacggcgtaggttctgacgtttatagcgtgacctccttcaccgagctggcgcgtgatggtcaggattgtgaacgctggaacatgctgcacccgctggaaactccgcgcgttccgtatatcgctcaggtgatgaacgacgctccggcagtggcatctaccgactatatgaaactgttcgctgagcaggtccgtacttacgtaccggctgacgactaccgcgtactgggtactgatggcttcggtcgttccgacagccgtgagaacctgcgtcaccacttcgaagttgatgcttcttatgtcgtggttgcggcgctgggcgaactggctaaacgtggcgaaatcgataagaaagtggttgctgacgcaatcgccaaattcaacatcgatgcagataaagttaacccgcgtctggcgtaagaggtaaaagaataatggctatcgaaatcaaagtaccggacatcggggctgatgaagttgaaatcaccgagatcctggtcaaagtgggcgacaaagttgaagccgaacagtcgctgatcaccgtagaaggcgacaaagcctctatggaagttccgtctccgcaggcgggtatcgttaaagagatcaaagtctctgttggcgataaaacccagaccggcgcactgattatgattttcgattccgccgacggtgcagcagacgctgcacctgctcaggcagaagagaagaaagaagcagctccggcagcagcaccagcggctgcggcggcaaaagacgttaacgttccggatatcggcagcgacgaagttgaagtgaccgaaatcctggtgaaagttggcgataaagttgaagctgaacagtcgctgatcaccgtagaaggcgacaaggcttctatggaagttccggctccgtttgctggcaccgtgaaagagatcaaagtgaacgtgggtgacaaagtgtctaccggctcgctgattatggtcttcgaagtcgcgggtgaagcaggcgcggcagctccggccgctaaacaggaagcagctccggcagcggcccctgcaccagcggctggcgtgaaagaagttaacgttccggatatcggcggtgacgaagttgaagtgactgaagtgatggtgaaagtgggcgacaaagttgccgctgaacagtcactgatcaccgtagaaggcgacaaagcttctatggaagttccggcgccgtttgcaggcgtcgtgaaggaactgaaagtcaacgttggcgataaagtgaaaactggctcgctgattatgatcttcgaagttgaaggcgcagcgcctgcggcagctcctgcgaaacaggaagcggcagcgccggcaccggcagcaaaagctgaagccccggcagcagcaccagctgcgaaagcggaaggcaaatctgaatttgctgaaaacgacgcttatgttcacgcgactccgctgatccgccgtctggcacgcgagtttggtgttaaccttgcgaaagtgaagggcactggccgtaaaggtcgtatcctgcgcgaagacgttcaggcttacgtgaaagaagctatcaaacgtgcagaagcagctccggcagcgactggcggtggtatccctggcatgctgccgtggccgaaggtggacttcagcaagtttggtgaaatcgaagaagtggaactgggccgcatccagaaaatctctggtgcgaacctgagccgtaactgggtaatgatcccgcatgttactcacttcgacaaaaccgatatcaccgagttggaagcgttccgtaaacagcagaacgaagaagcggcgaaacgtaagctggatgtgaagatcaccccggttgtcttcatcatgaaagccgttgctgcagctcttgagcagatgcctcgcttcaatagttcgctgtcggaagacggtcagcgtctgaccctgaagaaatacatcaacatcggtgtggcggtggataccccgaacggtctggttgttccggtattcaaagacgtcaacaagaaaggcatcatcgagctgtctcgcgagctgatgactatttctaagaaagcgcgtgacggtaagctgactgcgggcgaaatgcagggcggttgcttcaccatctccagcatcggcggcctgggtactacccacttcgcgccgattgtgaacgcgccggaagtggctatcctcggcgtttccaagtccgcgatggagccggtgtggaatggtaaagagttcgtgccgcgtctgatgctgccgatttctctctccttcgaccaccgcgtgatcgacggtgctgatggtgcccgtttcattaccatcattaacaacacgctgtctgacattcgccgtctggtgatgtaagtaaaagagccggcccaacggccggcttttttctggtaatctcatgaatgtattgaggttattagcgaatagacaaatcggttgccgtttgttgtttaaaaattgttaacaattttgtaaaataccgacggatagaacgacccggtggtggttagggtattacttcacataccctatggatttctgggtg

SEQ ID NO: 4 - protein, 887 aa, Escherichia coli
MSERFPNDVDPIETRDWLQAIESVIREEGVERAQYLIDQLLAEARKGGVNVAAGTGISNYINTIPVEEQPEYPGNLELERRIRSAIRWNAIMTVLRASKKDLELGGHMASFQSSATIYDVCFNHFFRARNEQDGGDLVYFQGHISPGVYARAFLEGRLTQEQLDNFRQEVHGNGLSSYPHPKLMPEFWQFPTVSMGLGPIGAIYQAKFLKYLEHRGLKDTSKQTVYAFLGDGEMDEPESKGAITIATREKLDNLVFVINCNLQRLDGPVTGNGKIINELEGIFEGAGWNVIKVMWGSRWDELLRKDTSGKLIQLMNETVDGDYQTFKSKDGAYVREHFFGKYPETAALVADWTDEQIWALNRGGHDPKKIYAAFKKAQETKGKATVILAHTIKGYGMGDAAEGKNIAHQVKKMNMDGVRHIRDRFNVPVSDADIEKLPYITFPEGSEEHTYLHAQRQKLHGYLPSRQPNFTEKLELPSLQDFGALLEEQSKEISTTIAFVRALNVMLKNKSIKDRLVPIIADEARTFGMEGLFRQIGIYSPNGQQYTPQDREQVAYYKEDEKGQILQEGINELGAGCSWLAAATSYSTNNLPMIPFYIYYSMFGFQRIGDLCWAAGDQQARGFLIGGTSGRTTLNGEGLQHEDGHSHIQSLTIPNCISYDPAYAYEVAVIMHDGLERMYGEKQENVYYYITTLNENYHMPAMPEGAEEGIRKGIYKLETIEGSKGKVQLLGSGSILRHVREAAEILAKDYGVGSDVYSVTSFTELARDGQDCERWNMLHPLETPRVPYIAQVMNDAPAVASTDYMKLFAEQVRTYVPADDYRVLGTDGFGRSDSRENLRHHFEVDASYVVVAALGELAKRGEIDKKVVADAIAKFNIDADKVNPRLA

SEQ ID NO: 5 - protein, 630 aa, Escherichia coli
MAIEIKVPDIGADEVEITEILVKVGDKVEAEQSLITVEGDKASMEVPSPQAGIVKEIKVSVGDKTQTGALIMIFDSADGAADAAPAQAEEKKEAAPAAAPAAAAAKDVNVPDIGSDEVEVTEILVKVGDKVEAEQSLITVEGDKASMEVPAPFAGTVKEIKVNVGDKVSTGSLIMVFEVAGEAGAAAPAAKQEAAPAAAPAPAAGVKEVNVPDIGGDEVEVTEVMVKVGDKVAAEQSLITVEGDKASMEVPAPFAGVVKELKVNVGDKVKTGSLIMIFEVEGAAPAAAPAKQEAAAPAPAAKAEAPAAAPAAKAEGKSEFAENDAYVHATPLIRRLAREFGVNLAKVKGTGRKGRILREDVQAYVKEAIKRAEAAPAATGGGIPGMLPWPKVDFSKFGEIEEVELGRIQKISGANLSRNWVMIPHVTHFDKTDITELEAFRKQQNEEAAKRKLDVKITPVVFIMKAVAAALEQMPRFNSSLSEDGQRLTLKKYINIGVAVDTPNGLVVPVFKDVNKKGIIELSRELMTISKKARDGKLTAGEMQGGCFTISSIGGLGTTHFAPIVNAPEVAILGVSKSAMEPVWNGKEFVPRLMLPISLSFDHRVIDGADGARFITIINNTLSDIRRLVM

SEQ ID NO: 6 - DNA, 10863 bp, Escherichia coli
  CDS (9596)..(10798)
gactgtcggcgcagtaagcttcgcgaaatagatttaggaataagcgaagaaaaatccctttgccgacaggcgcaaattaaatctcgtcaggtgtacgcaggttagttacggcaatgcgttcaccgcgcttgcgttcgcgctctgattgcatattggcgcgataaacgccctgatcgccaaccacccaggagagcggacgacgttctttgccgatagattcctgcaacagcatcagtgcctgcatgtacgcttcaggacgcggcgggcagcccgggatatacacatcaaccgggatgaatttatcgacgccctgcacaacggaataaatatcgtacataccaccagagttggcacaggcacccattgagataacccattttggttccagcatctggtcatacagacgctgaataaccggtgccattttggtaaagcaggttcctgcaaccaccatcaggtcagcctgacgcggcgaagcacgcaatacttctgcgccaaaacgcgccacgtcatgcaccgcggtaaacgaagtcaccatctcaacgtaacagcaggaaagaccgaagttatacggccaaattgagtttttacgaccccagttaaccatgtcattgagcttgcccataaacacgtttttgttaacttcttgctccagagggtcggttacgatctcctgcttttgcagggggtaacggtcgttctcaccgttgggatctatgcgggtgagcgtataatccatcttaatgcctcgcggttagcgttgacgattagcgatactgttcgtttccgggttcatacgctcgcggcgtgaacgcgcgggcgtccagtccagcgcgccaatacgcaccagataaaccagacctgccagtaacacaaaaataaaaattgcagcttccacaaagcctacccagccgctttcgcggatagaggttgaccatgcgaacagatacagcgcttcaacgtcgaagataacgaagaacatggccaccagataaaacttggcggacaggcgtaagcgggcggagccgaccgagtcgataccggattcaaacggcacgtttttcgacctcgcgcgtgcgcgaccgcctaaaaaccaaccgcctaccagcatcaggcaacacaggccaatggcaacgataagaaagatagcgaatgcccagtgatgagcgatgacttcagtggatgttgacatactcattgcttactcatcaaaagtagcgccagattcactgctcttcacggcagatggacgccacatcgattcatggggaggaataaaaaaaaccttacaatcactgtagaaattcttttatacagctaattgatgtggttttttactcctttctataaccttttgtcaactttaacaaaagtttcttcacattagtttacataatatcaacaccattagcatttaatgccctttcaccccagatccttgacgactccaggataattagatgttgttgaatcgtgtccgttgtgaagcaatggaaaaaatacgggtctattttgacaggaatttgtgtcgattcctccccccaaaagagagtattttcttgatctgtgacacgcttttgtcattccataacaaaaacgcagcaacaaatttacgtattttttaacatcattgtagcaggtgatttttttcaggcgattatttgtgcgttcgggacgtgaatctctggtggttgaaaaatgaacagttttgtacgttctgcactatgcgatgaaggatttttactaaaaaaaagccgctggggtttaaaacacccccagcggctcgttttttacactattgtctcaggaattatctatcgtccgtcgattactcgatatccctttcaatcaacaatgaatcatccccttccggagcagacattgggctgtattgccacggattatggtagctctccatcgcctgatagatcacctgggccagctcattattactggacggatcatagcacagcaaatattcggtatcaggtagcggcggtaagccatctactccactcagcacacgcaggtccgggctcatcatctcaaccggccttgccgtcacgccaagaccggctttcactgccgcacgaacggccggaagcgtcgaggcgacataagccagtcgccatggaatatctgctttattaagcgtcgccagcaccatatcgcgaaacgggctaggatcatccagcaatacaagagggatcggctcgcctttttgcaatatgtattccgctgcgcagtaccagtgtgttggcgaggtacgcaggttcaatgccttaaacgctgaaggacgatgggtggttaccatcaaatccacttcctgggattccagcatttctgccatataggcattacgtttaacgcggacatccagcgctaatttcggataaaccgaactcacgcgatttaacaggaaaggtaagatcgtatcggcagattcatctgaagcaccgatagttaatacgccctgaagattactgaacattaatgatgagcaggcctcatcattaaaacgcaggattttcctggcgtaaccaagaagttgaatgccatgttcagttaacagtttgttgcgaccgtgacgagcgaacagttctttcccaacgagttgttccagacgctgcatttgctgacttacggcggactgagtacgacacacagcggcagctgcggcagcaaaagtgttcagatcggcaacagcaacaaatgttctcagcagatcgaggtcgaggttaattatcggacgatttgcacttatcatatattatcacttactggcggctcatactgagctggttaatgctgtgcacacacaaacaagcaattccatttgtaatgtgcctccctggcagtttcatccggaacccggacgaaagtaaaaatgcatatgagttgcactaaaaaagcgactcacattgttccgttataatgcctgaagtagatcacagaatatatcttcagggatcgcatatctattaagttactcactcttttctatttatgacatgcgcgtgtttgtataaatgtaaatgtgagtccttgttccactctcgtgcagcatcgctggtcatacgcgaacacgtaccaacagcaatggtgaggcggcatcaagagcagggatccgtcatttatccgagcattttaccccaaaaaccttttatttataagggtcattgcgaattatctgatgcaaagttatgttatgttaggcaaagtaatcttctattattaataagcacatcaaaacctttttgaatattaaataataattaattagcatcatcctcattcattaattccgcttaacaatagtttcacaccttgcccccattgcgacacctcggaaatcatcacgcagttaaactctccgtaatgaggaaatatcatcatcgcgtttcattagtgaattcttaaatgaggcattttcacacaattatcttacagataaaaaaaccagacttacaattaagaatcagaacaattcactatataacattgcatgtaaagcatatacacctcattattttgtcattattaagttattaacagcacaatcgagccttcccctctggcaaaatcttattctgcagaccttcaaaacaccgtcctgggggagtacattgttctaagctgacttccacggcagggagtggcgataacagcaaaaaaggtcaagattcatgtcccccattgaaaaatccagcaaattagagaatgtctgttatgacatccgtggtccggtgctgaaagaagcaaaacgcctggaagaagaaggtaacaaggtactgaaactgaacatcggcaacccagccccgttcggttttgacgcgccagatgaaatcctcgttgacgtgatacgcaacctgcctaccgctcaagggtattgcgattccaaaggtctttactccgcgcgtaaagccatcatgcagcactaccaggctcgtggcatgcgtgatgttaccgtggaagatatttacatcggcaatggtgtatcggagcttatcgttcaggcaatgcaggcattgctgaacagcggggacgaaatgttggttcctgcaccagattacccactctggaccgcggcggtttcgctttccagcggtaaagcggtgcattatctttgcgatgaatcctctgactggttcccggacctcgatgatattcgcgctaaaattacgcctcgtacgcgtgggatcgttattatcaacccaaataacccaaccggcgcggtatattccaaagagcttttaatggagattgtggagattgcacgtcagcataatctcattatcttcgccgatgaaatttatgacaaaattctctacgacgacgctgagcatcactcaattgcgccgctggcacctgacctgctgaccattacctttaacggactgtcgaaaacgtaccgcgttgcaggcttccgtcaggggtggatggtgttgaacgggccgaaaaaacacgccaaaggctacatcgaaggtctggaaatgctggcttcaatgcgcctgtgtgctaacgttcctgcgcaacacgccattcagaccgcgctaggtggttatcagagcatcagtgaatttattacccctggcggtcgtctttatgagcagcgtaaccgcgcgtgggaactgatcaacgatattccgggcgtttcctgcgtgaaacctcgtggtgcgctgtatatgttcccgaaaatcgacgccaaacgctttaacattcacgacgatcagaaaatggtgttggatttcctgttgcaggaaaaagttctgttggtgcaagggacggcattcaactggccgtggccggatcacttccgcattgtcacgctaccgcgtgtcgatgatatcgagctgtctttgagcaagttcgcgcgtttcctttctggttatcatcagctgtaatcttaatttcactgccggagattgcatccggcagcgttatcccgccacaatgacctgatgatgtcatcatacgtaaggtcactatgaaacagagccatttttttgcccatctctcccgcctgaaactcattaaccgctggccgctcatgcgcaacgtgcggacggaaaatgtgtccgaacacagtttgcaggtagcgatggtcgcccatgcgctggcagctatcaaaaatcgaaaatttggcggtaatgtcaacgccgaacgtatcgctttactggcgatgtaccacgatgcctcagaagtgctcaccggcgatctccctactccggtgaaatacttcaattcgcaaatcgctcaggagtacaaggctattgaaaaaatcgctcagcaaaaactggtcgatatggttccggaagagctgcgggatatctttgcgccgttaattgacgagcatgcatatagcgatgaagaaaaatcgctggtgaaacaggcagatgcactgtgtgcatatctgaaatgtctggaagaactcgcggccggaaataatgaattcttgctggcaaaaacgcgactggaagcgacgcttgaagcgcgtcgcagccaggagatggactacttcatggaaatatttgttcccagcttccatctttcgctcgatgagattagccaggattcaccgctgtaagcagccggagtctgcgtcgcatcaggcaataagcgccggatgcgacatcaggctcttgtcaaaacggaaacagcatcgggatcatcaccacacaaaccgccatcacgataatggtgaacggtacccccaacttcacaaagtcactgaagctgtaatttcccggacctaaaaccagtgtgttaacaggtgaagaaaccggtgtcataaaggcggcggatgctgccatcgccacgaccatcgcgaatggataaggcgacacccccatcgttttggcagcagccagcgcaatcggagccatcaacaccgccgtcgcggtattagagataaatagcccaataaccgccgacaagacaaacaaacaccccagcatcatatgtggcccgtaaccaccgccaatgtccatcagccctttcaccgccagcgcgacacctcccgttttctgtaatgccacagcaaacggcatcatcccaacgatcaaaataatgctcggccagtgaatggatttataggcgctttcagcatctatacagcggaatttccccatcagcaggcaggcgatgatagcggcaacaggattaggaatttcatctgtcagcattaacgccaccattagcaccagacagaaaatggcatggggtgcctggctgtgcgcgggtgatgcttcactcacctcttccggtaagttcagcgctacgaagtcgcggccctgtttggccagcataccgatcagtttccagttacccacaaccaggatgatatcgcccagcagcagaggctcatccgccagcgaaccttccagcgccacgccattgcgctttagccccaccacattcagtccgtagcgggtacgaaaaccaatttcgcgcaccgatttaccaatcagttctgactcaggaattaatgaaatctctgccatgcccacatcaagggcctggtcagaaaaatactcgccgcgcagtaccatcggctccagcaattgctcactacaaaattgccggagatcgacatcagccgcagacatatcaataagcaaaacgtcacgcgcgcgaaattcagaaaccccattaacgttcacgataacgcgacgaaaacgccgccagcgttcaacaccgatgacgttagcgccataacgctcacgtaatttgagatcatccagccgttgaccaatcattggcgatccggggcgaatagccagacgtcgcgcacgcccggtcagtcgatattcacggataagatcgcgaaaggttcgacgcgtccagccttcgcgctgcggggtctgggtatcccctttcagcatgaaacgcatcactaacatatacaaaatacccagcaccagcacgaccaggccaataggtgttacgctaaagaaactgaagccgtgatagccttcacgcagcaattcactgttgactaccaggttcggcggcgtcgccaccagcgtcatcatgccgctaatcagcccggcaaaacttaacggcatcatcagacgtgacggcgacgtttgcatacgcatggcaacgcttaacaccacgggaataaagatagcgacaacgccggttgaactcataaacgcgccaagccccgcgacggtcagcatcaacaaaaccaacattttgatttcactattgcccgcaactttgaccagccatgttcccattacggtggcaacaccggtacggaccaaaccatcgccaataataaacaaggcggcaatcaggacaacgttaggatcagaaaagccggaaaatacttctgggactgtcagcgttccgcttaatgcaaacgcgacaataacaaacaaagcgaccgcatccatacgcactctgcccgtcgcaaacaagacgatggcaacggccagtaatgaaagaacccaaatcaattcaccgttcacaacttatccttgttaattgagggggatgacttgattctgccataaaaaagccccgacgagacggggctaaatcatgatcaggtgtttcactgaataataacatcgccatttggctgtttggtcacagtaatttgctccagactgtggaggaccaaatcgacctcattcaggcgcggggtatctgccggagcgttaaccgcaatgacatgacaacccgccgccaggccagaaagcacgccagcgggagcatcttccaccaccacacactcctgcggcgcaagccccagcagctgcgcgcctaacagatacgcatcaggttctggttttccgcgcttcactcgctcagcggttacaaacacctctggtgcgggaagcccagctattttatggcgcgctcgcgctaccggcatggagccagaagtcacaatggcccacggaatacctgctttattcaaatgactgagtaaggcgattgcccccggaagcgcggtaataccttcggtttccgtggcctcgatgtgctccagacgcgtaaactcggcggcaatatcagcctcggatttgcccgccataaaatggcgcagagaggtgatcgcctgtttaccgtgaatgaaagccagcacctcttccggcgctaacccatgacgtctggcccagttgctccacgcccgttctaccgcaggcagggaatccaccagcgttccatcaagatcaaacagaaaacctttgcaccgcacgcgggcctcctcaggcattgataatttgattaatttcgttggcgctcaaatggtactgacgcgggcaggcatgccacacattaagcatgcgctgatatttttcccacattggcgtctgggcgttaaaaccgtgagttccggcgtcaaaatgggtatagcgcccttccacattaaccataaagcggacataaccgaggtaacgtgcttcagtggcggcgtcaaagccgaggaaggtgacacgacgttcatcgatggattgctggtcctgcaaattagaccaggaaacatgcaacgcatgatacatctccataatgtcgatgatagtgcggcaggtttcttctttcagctcgccaaactcgcgatccaattcacgcatctgtaatccgtaaccacgctcaataattgtttgcaggcgacggtaacgttcagcatttgccggatcgagcatagtcatcatcttgtactgattagacaaaataagacgttgcgcgttggtcatttccattgttgactcctgtatcactctactacggtgaaaaaaaagaaggctgagtatgccttcttttatatgcgtaatcaggggtcaattacaaatcatcaaggaaagttttatccagttgtttgaaggcgcgcttaagcgtgtcagctaatgcctggtaatcaggcttgccttcaacgggtgccaacacctgtccagactcctgcaatttaccgcgaacttcataaaaccagttaaggattgcagggggtaatggcgtgacagaacgcttgcccagccaccacaatccctgcatgggtaaacttaaggcgaacagggcagtggcaactgccggcccaagctgaccgcccagggcaatctgccagcagagagtaaatacggcgatcggcggcataaaacggatcgcataacgcgtcatcttgataacgcgattttcgacaaagaccggggcaaggcgtttttccagcggccacgtctttgagtaatgctgtccccggcgaaacaagctaaaaaaattaacagaacgattatccggcgttgacatgcttcacctcaacttcacatataaagattcaaaaatttgtgcaaattcacaactcagcgggacaacgttcaaaacattttgtcttccatacccactatcaggtatcctttagcagcctgaaggcctaagtagtacatattcattgagtcgtcaaattcatatacattatgccattggctgaaaattacgcaaaatggcatagactcaagatatttcttccatcatgcaaaaaaaatttgcagtgcatgatgttaatcataaatgtcggtgtcatcatgcgctacgctctatggctccctgacgtttttttagccacgtatcaattataggtacttccatgtcgagtaagttagtactggttctgaactgcggtagttcttcactgaaatttgccatcatcgatgcagtaaatggtgaagagtacctttctggtttagccgaatgtttccacctgcccgaagcacgtatcaaatggaaaatggacggcaataaacaggaagcggctttaggtgcaggcgccgctcacagcgaagcgctcaactttatcgttaatactattctggcacaaaaaccagaactgtctgcgcagctgactgctatcggtcaccgtatcgtacacggcggcgaaaagtataccagctccgtagtgatcgatgagtctgttattcagggtatcaaagatgcagcttcttttgcaccgctgcacaacccggctcacctgatcggtatcgaagaagctctgaaatctttcccacagctgaaagacaaaaacgttgctgtatttgacaccgcgttccaccagactatgccggaagagtcttacctctacgccctgccttacaacctgtacaaagagcacggcatccgtcgttacggcgcgcacggcaccagccacttctatgtaacccaggaagcggcaaaaatgctgaacaaaccggtagaagaactgaacatcatcacctgccacctgggcaacggtggttccgtttctgctatccgcaacggtaaatgcgttgacacctctatgggcctgaccccgctggaaggtctggtcatgggtacccgttctggtgatatcgatccggcgatcatcttccacctgcacgacaccctgggcatgagcgttgacgcaatcaacaaactgctgaccaaagagtctggcctgctgggtctgaccgaagtgaccagcgactgccgctatgttgaagacaactacgcgacgaaagaagacgcgaagcgcgcaatggacgtttactgccaccgcctggcgaaatacatcggtgcctacactgcgctgatggatggtcgtctggacgctgttgtattcactggtggtatcggtgaaaatgccgcaatggttcgtgaactgtctctgggcaaactgggcgtgctgggctttgaagttgatcatgaacgcaacctggctgcacgtttcggcaaatctggtttcatcaacaaagaaggtacccgtcctgcggtggttatcccaaccaacgaagaactggttatcgcgcaagacgcgagccgcctgactgcctgatttcacaccgccagctcagctggcggtgctgttttgtaacccgccaaatcggcggtaacgaaaga

SEQ ID NO: 7 - protein, 400 aa, Escherichia coli
MSSKLVLVLNCGSSSLKFAIIDAVNGEEYLSGLAECFHLPEARIKWKMDGNKQEAALGAGAAHSEALNFIVNTILAQKPELSAQLTAIGHRIVHGGEKYTSSVVIDESVIQGIKDAASFAPLHNPAHLIGIEEALKSFPQLKDKNVAVFDTAFHQTMPEESYLYALPYNLYKEHGIRRYGAHGTSHFYVTQEAAKMLNKPVEELNIITCHLGNGGSVSAIRNGKCVDTSMGLTPLEGLVMGTRSGDIDPAIIFHLHDTLGMSVDAINKLLTKESGLLGLTEVTSDCRYVEDNYATKEDAKRAMDVYCHRLAKYIGAYTALMDGRLDAVVFTGGIGENAAMVRELSLGKLGVLGFEVDHERNLAARFGKSGFINKEGTRPAVVIPTNEELVIAQDASRLTA

SEQ ID NO: 8 - DNA, 11630 bp, Escherichia coli
  CDS (1163)..(2602)
aattctctgctgcaagatgaataatgtttatctacagcatttccttaaaagatatgtcaggcttgcggagtggcggttaaggacatacgatttcctcctttcagagtgctccgcttctcactattatctcacgcagtattcttaagggaacgataaggaggaaccatgaacattaccccgtttccgacgctttcgccggcaactatagatgccataaatgttatcggacagtggctggcgcaggatgatttctccggtgaggtgccgtatcaggccgattgcgtgatccttgcaggcaatgcggttatgccgactatcgatgcggcatgtaagattgcccgcgatcagcaaattcctttactgattagtggtggtatcggtcactcgacaacttttttgtatagcgccatcgcacagcatccgcactacaacactatccgcaccactggcagagcagaagcgaccatcctggcggatatcgctcatcagttctggcacattccgcatgaaaaaatctggattgaagaccagtcaacaaactgcggtgaaaacgcacgctttagcatcgcgctattgaatcaggccgtagaacgagttcatacggctatcgttgttcaggaccccaccatgcagcggcgcacgatggcgacgttccgccgtatgactggggacaatcccgatgcaccacgctggttaagttatcccggattcgttcctcagttaggaaataacgcagacagtgtaatctttattaatcagttacaaggattatggccagttgagcgttatctctcactactcactggcgagctgccgcgtttacgcgatgatagcgatggctacggtccccgcgggcgagattttatcgttcacgttgattttccggcagaagtcatccatgcatggcaaacgctgaaacatgatgcggtgctcatcgaggcgatggaaagtcgctcgttacgttaaaaattgcccgtttgtgaaccacttgtttgcaaacgggcatgactcctgacttttatttctgccttttattccttttacacttgtttttatgaagcccttcacagaattgtcctttcacgattccgtctctctgatgattgatgttaattaacaatgtattcaccgaaaacaaacatataaatcacaggagtcgcccatgtcagtacccgttcaacatcctatgtatatcgatggacagtttgttacctggcgtggagacgcatggattgatgtggtaaaccctgctacagaggctgtcatttcccgcatacccgatggtcaggccgaggatgcccgtaaggcaatcgatgcagcagaacgtgcacaaccagaatgggaagcgttgcctgctattgaacgcgccagttggttgcgcaaaatctccgccgggatccgcgaacgcgccagtgaaatcagtgcgctgattgttgaagaagggggcaagatccagcagctggctgaagtcgaagtggcttttactgccgactatatcgattacatggcggagtgggcacggcgttacgagggcgagattattcaaagcgatcgtccaggagaaaatattcttttgtttaaacgtgcgcttggtgtgactaccggcattctgccgtggaacttcccgttcttcctcattgcccgcaaaatggctcccgctcttttgaccggtaataccatcgtcattaaacctagtgaatttacgccaaacaatgcgattgcattcgccaaaatcgtcgatgaaataggccttccgcgcggcgtgtttaaccttgtactggggcgtggtgaaaccgttgggcaagaactggcgggtaacccaaaggtcgcaatggtcagtatgacaggcagcgtctctgcaggtgagaagatcatggcgactgcggcgaaaaacatcaccaaagtgtgtctggaattggggggtaaagcaccagctatcgtaatggacgatgccgatcttgaactggcagtcaaagccatcgttgattcacgcgtcattaatagtgggcaagtgtgtaactgtgcagaacgtgtttatgtacagaaaggcatttatgatcagttcgtcaatcggctgggtgaagcgatgcaggcggttcaatttggtaaccccgctgaacgcaacgacattgcgatggggccgttgattaacgccgcggcgctggaaagggtcgagcaaaaagtggcgcgcgcagtagaagaaggggcgagagtggcgttcggtggcaaagcggtagaggggaaaggatattattatccgccgacattgctgctggatgttcgccaggaaatgtcgattatgcatgaggaaacctttggcccggtgctgccagttgtcgcatttgacacgctggaagatgctatctcaatggctaatgacagtgattacggcctgacctcatcaatctatacccaaaatctgaacgtcgcgatgaaagccattaaagggctgaagtttggtgaaacttacatcaaccgtgaaaacttcgaagctatgcaaggcttccacgccggatggcgtaaatccggtattggcggcgcagatggtaaacatggcttgcatgaatatctgcagacccaggtggtttatttacagtcttaatgagtgaaagaggcggaggttttttcctccgcctgtgcgcgtcagagtttagcgaatttttcgagggtgcgaataagctgtgtgacgaagccatattcgttatcgtaccaggcgaccgttttcaccagttgtaaatcgcccacggcggtaatttccgtttgcgtggcatcaaacaccgaaccgaaatggctgccaatgatatcggaagagactatttcttcatcggtataaccaaatgactcgttattggtggttgcttgtttaagtgcgttattcacctcttcggcagtcacttttttccgagaatcgataccagttcagtgaccgaacctgttttcaccggcacgcgttgcgcatgacctttcagtttgccgctcagttccgggatcaccagaccaatggcttttgccgcccccgtagtgtggggaatgatattttctgccgctgcgcgtgaagcacgtaaatctttaccacgcgggccatccaccagtgactgggtgccagtataggcatgaatggtcgtcatcgtgccgacttctatcccgaaactgtcatgcaaggctttggccatcggcgcaagacagttagtggtgcatgacgccacggaaacaatggtgtcgttgccatccagagtgtcgtcattgacgttataaacgatagttttcatttcaccggcaggggcggaaatcaacaccttcttcgcaccagcatcaagatgcgcctgcgatttctcggcggaggtataaaagccagtacattcgacaatgatttctgcacctttcgctttccacggaatatttttagcctctttttcggcgtaaaccgcgatacttttcccatcaacgataagtgaatcttccgtaaaatcaacgctccaggggaatggtccgtagtttgaatcatgtttcagcaggtaggcgagaatttatggggaagtgagatcattaatagcgacaacgtctatgttgcttttgacttcaagtaatcgacccaacaccagtcgaccgatacgaccaaaaccgttaataccaactttactcatggttttctcctgtcaggaacgttcggatgaaaattgatcctttccaagcttagaccaggatggcgggatgggcaatctccattctcacagtgaaacgtaacgtactgaaaacgggtgaacaatatttaatgaaattttgagaaaagcccgttatgttaacggaaaattatgttaaagcaggaaatgttatggaaaataaatattcaaggttacaaatcagcattcactggctggtctttttactggttatcgcagcgtattgcgcaatggagtttcgtggtttcttcccacgtagcgatcggccactcatcaacatgattcatgtttcctgtggcatctcaattctcgtgctgatggtcgttcgtcttttgttaaggctgaaatacccaaccccgccgattatacctaagccaaaaccgatgatgacgggactggcgcatttgggacatttggtgatttatctcctgtttattgcgctgccagtgattggtttggtgatgatgtataaccggggcaacccgtggtttgcgtttggtttgacgatgccttacgcttcagaggccaatttcgaacgggtagatagcttaaagtcgtggcatgaaacgctggcgaatctgggatattttgtcatcgggttgcacgctgcggctgcactggcacaccactatttctggaaggacaacacacttctacgcatgatgccgcgtaaacgttcctgaaggatatttaaagaaaacgcctgtactaaaaccgacccgtggtacaggcgaagaatacgggtctacatcggaagcgcctattatatttatttgtatgataaataaaaccataatccttgcccatacgtccatctggcttatttttaatcaattcacccgatctttgatctcatcaacggtatcaaaataaaccagcgtataacgttcaaatcgaacataagattcgataaaccatggaggttatatgaaaaaactggcacttattttgtttatgggaacgcttgtttccttttatgccgatgccgggcgcaaaccctgttctggttcgaaaggggggatctcacactgtacggcaggcggcaaatttgtctgtaatgatggttctattagtgcatcgaaaaaaacatgcactaactgaagtgtaaaaggggtgccatgagaaaatgaatctgctagtcaaatgcgcggggaaaatccccgcgcttgcccttacctggacgtgcaggccatgagcgcagcaacctccttatcaccgtcccggaaccgcagttcgtagagcgtttgtcgggtcaggagtgtgaatgtcagaatcgtaatgcagataatgagcagacacaccaccagagggttgtgcttcatagcctttctccttgccggatggcgggtaagaggctaagatctgaattgctaggttcattcgttggcctcggttgatagaaatatcggtcggggccttcgtctttctgattcccggttagcctgaaaacagaaagtctcaggcacccgcaggcatcctatgaggtttccttagggacgaaaataatcacttcacgaaattgcgtgctgttttccagaatttttcgtcattcgggttagccagtttagccattcgttactctcttcattccaatagcattaattttctatgcaataattgttgtaaaaatgtgacgcaaagaggtttttggtcataagtaattaccgtcaagtgccgatgactttctatcaggagtaaacctggacgagagacaacggtaatgaatacaactccctcacagcgattaggttttttgcatcacatcaggttggttccgttatttgcctgcattctaggcggtatcttagttctattcgcattaagttcagccctggctggctatttcctctggcaggccgatcgcgatcagcgtgatgttactgcggagattgagattcggaccgggttagcgaacagttcagattttttgcgttcagcccggatcaatatgattcaggccggggctgcgagtcgtattgcggaaatggaagcaatgaagcgaaatattgcgcaagccgaatcggagattaaacagtcgcagcaaggttatcgtgcttatcagaatcgaccggtgaaaacacctgctgatgaagccctcgacactgaattaaatcaacgctttcaggcttatatcacgggtatgcaacctatgttgaaatatgccaaaaatggcatgtttgaagcgattatcaatcatgaaagtgagcagatccgaccgctggataatgcttataccgatattttgaacaaagccgttaagatacgtagcaccagagccaaccaactggcggaactggcccatcagcgcacccgcctgggtgggatgttcatgattggcgcgtttgtgcttgccctggtcatgacgctgataacatttatggtgctacgtcggatcgtcattcgtccactgcaacatgccgcacaacggattgaaaaaatcgccagtggcgatctgacgatgaatgatgaaccggcgggtcgtaatgaaatcggtcgcttaagtcgtcatttacagcaaatgcagcattcactggggatgacagtagggactgttcgacagggcgcggaagagatttatcgtggcaccagcgaaatttcagctggcaatgcggacctgtcatctcgcaccgaagaacaagcggcggctatcgaacaaactgccgccagcatggagcaactcactgcgacggtgaaacagaatgcggataacgcgcatcatgccagcaaactggcgcaagaggcttctattaaagccagcgatggcgggcagacggtttccggtgtagtaaaaacgatgggcgctatctccacgagttcgaagaaaatttctgagatcaccgccgtcatcaacagtattgctttccagacgaatattctggcactgaatgctgccgttgaagccgcgcgagcgggtgagcaagggcgtggatttgccgttgtcgccagcgaagtacggacactcgcaagtcgcagcgctcaggcggcgaaagagattgaaggcttgatcagtgaatcagtcaggttaattgacctggggtcggatgaggtggcaacggccgggaaaaccatgagcactattgttgatgccgtcgcgagtgtcacacatatcatgcaggaaatcgccgccgcctcggatgaacaaagtagaggcataacgcaggttagccaggcgatttctgaaatggataaggtgacgcaacagaatgcttctctggtagaagaggcctcagcggcggcggtgtcccttgaagaacaggcggcacgattaactgaggcggtggatgtattccgtctgcacaaacattctgtgtcggcagaacctcgcggagcgggtgaaccagttagtttcgctacggtgtgaaaatgttcaaggagggatcgacagatcccttcacctttcagaacggcattgattttcgaatagcgttaatcatcaactggcaaccagaagagaacgtcgcatctacgcgggtcagtattccaatcggttcgcctgcaccatgtcccggaacaggcagggccaccagcgtggcatgacgcaggtcgtcttttacagcgccagaagggacaaaccacacgtaatcgtattcaaccgtaagttgacgagatagcgaagcagacagcgtttcgatacaacccgaaggaattttacagccctggctctgcactaatgcatctgaatgctggcgtggcgcagtgccttctggtgatacaacgaccggccattccagcacccggcttagcgttacgttctcctgaagtagcgggtgattagggcggacaaccagcttcaacgattcaagaaacagcagttcgtaattaagcccggtcatcagttcaggatctgacatccgaccaatgccgatatcgatttccccggtttttaaacccgccagaatcatagggttactcattgtcgcaacttgcaaggtcgtctctttttgttgctgatgaaactgacctataaccgaaggtaatatccccagtgccgcagtaggtagtgcaccaaccctgacgacatcattattaagaccttctttacgatgaagcgaccgtccggcagtgttgatggcgtcaagaactctgactgcatgcgttaaaaattgttcgccgggtaaggtaagttgcgccccctgacgaccacgctcaaacaagcgagcgccagtcagctgctccagttcattcaatgtcttagagagcgcaggttgactcaaattaagggtttcagccgcgcgccccaaagttccttgttgtgcgacagctacgaatgtatgaaggtggcgcaaacggatgcgctgactaaacagactatttttttccataagcgatgttaaaaacgaagcggtgtcgctgacaagtgaagttgtttgattatgataacttgattgcaaaatattattaacaattaaagcaattatgttacagcaaaatggataatattgatgttttcgcggcgagatcacagtttgtaaattcttcccgcaagagtgaatgcggttacctacactccagattactgaccactggaggcagacactatggcgaacagcatcacggcggatgagattcgggaacagttttcgcaggcaatgtcagccatgtaccagcaagaagttccgcaatatggcacgctgctggaactggtagctgatgtgaatctggctgtgctggaaaacaatcctcaactgcacgaaaaaatggtaaatgcagacgagctggcgcgactgaatgttgaacgtcatggggcgattcgcgttgggactgcacaagagcttgctactcttcggcggatgtttgccattatggggatgtacccggtgagctattacgatctctcgcaggcaggggtgccggtacattcgacagcatttcggcccattgatgatgcttctctggcgcgtaatcccttccgcgtttttacctccttactccgccttgagcttatcgagaacgaaattttgcgccagaaagcggcggagattctgcgtcagcgcgatatcttcaccccacgttgtcgacaactgttagaggaatatgagcagcagggcggttttaacgaaacacaggcacaggagtttgtgcaggaagccctggaaacgtttcgctggcaccagtcagcaacggtagatgaagaaacctatcgcgcattgcacaacgaacatcggttgattgctgatgtggtctgttttcctggatgccatatcaaccacctgacgccacgtacgctggatattgaccgggtgcagtcgatgatgcctgaatgcggaattgaacccaaaattctcatcgaggggccgccgcgccgcgaggtaccgattttactacgccagaccagctttaaagcactggaagagacggtgttgtttgcggggcagaaacagggcacgcataccgcgcgctttggtgaaattgagcagcgtggcgtggcattaacgccgaaagggcgacaactgtatgatgatcttctgcgtaacgctggaaccgggcaggataatctcactcaccaaatgcatttacaggaaaccttccgcacttttcctgacagtgagtttttaatgcgtcagcaagggttggcatggttccggtaccgtctgacgccttcgggtgaggcgcatcgtcaggcgattcatcctggagacgatccacagcccttaattgaacgtggttgggtagtggcgcaacccatcacctatgaagatttcttgcccgttagcgcggcggggatcttccagtcaaatctgggtaatgaaacgcagacacgcagtcacggtaatgccagtcgcgaagcatttgagcaggcgttgggttgtccggttttggatgagttccagctttaccaggaagcggaagaacgcagtaaacgtcgctgtggtttgctttaaaatctgaccatccgcctttgcaaaaatttgcctgattttacaaacgaatcaggctcatcccatcgacataaaaaaaatgccgatttatgcatattctctcagttcaacaattggattattaataaatattgtctagagtgagcggtcataaataagcactttcttgccgctgaaaacgaccagcgcgggaccattcacaacaccagaaggactcactttcaggtatggatcgtagacgatttattaaaggttcaatggctatggccgccgtgtgcggtaccagcggcattgcttctcttttttctcaggcggcattcgcggcagattctgatattgccgacgggcaaacccagcgttttgacttctccattctacagtcaatggcgcacgacttagcgcaaacagcgtggcgtggtgcgcctcgtccgttacctgacacgctggcgacaatgacgccgcaggcttataacagtattcaatacgacgccgaaaaatcgctctggcataacgttgagaaccgtcaactggacgctcagttcttccatatgggaatgggattccgtcgccgcgttcgtatgttttctgtagatccagcaacacatctggcgcgtgaaattcactttcgcccggagttgttcaaatacaacgatgcaggtgttgatacaaaacaattagaagggcaaagcgatctcggctttgccggttttcgcgtgtttaaagcccccgaactggcgcgccgtgatgtagtatcatttctcggcgcgagttatttccgcgccgttgatgatacatatcaatacggtttgtcggcccgcggcctggcgatcgacacttacaccgacagtaaagaagagttccccgactttaccgccttctggtttgatacggtaaaaccgggggcaactacctttaccgtttatgcgttgctcgatagcgccagcattactggtgcctataagttcactatccattgtgagaaaagtcaggtgattatggatgtggaaaatcacctgtatgcgcgcaaagacattaaacagctgggcattgcgccgatgaccagtatgttcagctgcggtactaatgaacgtcggatgtgcgatacaattcatccgcaaattcatgactctgatcgtctgtccatgtggcggggcaacggcgagtggatttgccgtccgctgaataatccgcaaaaattgcagttcaatgcttacaccgacaacaacccgaaagggtttggtttattgcaactggatcgtgacttctcccattatcaggacattatgggctggtataacaaacgcccaagtctgtgggtggaaccgcgtaacaagtggggtaagggcaccatcggcctgatggaaatcccaacaacgggcgaaacgctggataacattgtctgcttctggcagccagaaaaagctgtaaaagcaggtgatgagtttgcattccagtatcgtctgtactggagtgcgcaaccgcctgttcattgcccattagcgcgcgttatggcgacgcgtaccggcatgggcggtttctcggaaggttgggcgccaggtgaacactatcccgaaaaatgggcgcgtcgttttgccgtcgatttcgttggtggtgatctgaaagctgccgcgccaaaaggcattgagccggtgattacgctttccagtggggaagcgaagcaaatcgaaattctctatattgaacccatcgatggttatcgtattcagtttgactggtatccgacttcggactccactgatccggtcgatatgcggatgtatctacgttgtcagggggacgctatcagtgaaacatggctgtatcagtatttcccgccagcgccggataaacgtcagtatgttgacgaccgcgtgatgagttaatcgttttttcttcggcaccttcttcgggaggtgccgtctggttaaacacgatcccgctcgcatttttccctaagttaaatgagtaatctgatggtgtgtatttcagatacaccttgtcagccactaacagggagtgcgtatgtttccagaataccgagatttaatatcccgtctgaaaaacgaaaatc

SEQ ID NO: 9 - protein, 479 aa, Escherichia coli
MSVPVQHPMYIDGQFVTWRGDAWIDVVNPATEAVISRIPDGQAEDARKAIDAAERAQPEWEALPAIERASWLRKISAGIRERASEISALIVEEGGKIQQLAEVEVAFTADYIDYMAEWARRYEGEIIQSDRPGENILLFKRALGVTTGILPWNFPFFLIARKMAPALLTGNTIVIKPSEFTPNNAIAFAKIVDEIGLPRGVFNLVLGRGETVGQELAGNPKVAMVSMTGSVSAGEKIMATAAKNITKVCLELGGKAPAIVMDDADLELAVKAIVDSRVINSGQVCNCAERVYVQKGIYDQFVNRLGEAMQAVQFGNPAERNDIAMGPLINAAALERVEQKVARAVEEGARVAFGGKAVEGKGYYYPPTLLLDVRQEMSIMHEETFGPVLPVVAFDTLEDAISMANDSDYGLTSSIYTQNLNVAMKAIKGLKFGETYINRENFEAMQGFHAGWRKSGIGGADGKHGLHEYLQTQVVYLQS

SEQ ID NO: 10 - DNA, 12677 bp, Escherichia coli
gtcatttgctcctttaatcagctgtcgcgttcccctgccctataaaaggagggtatgcaccacgatggttcattacccaataagattgaaagctcaccactttgttgaaattgacagcaaacaaacaaaaaaatgcatttcaccctttgacatcaccatgcactgccattaatatgcgccccgttcacacgattcctctgtagttcagtcggtagaacggcggactgttaatccgtatgtcactggttcgagtccagtcagaggagccaaattcaaaaaagcctgctttctagcaggctttttgctttctaattaccaacgctcttaaaacatctgtcttgaaccagaactaatttgcacaggcattcccgatcgacgttgcaacgcagcatttgcgcgatttacatcaacttcttgcccgttgataaacgcccgcaaagatggggttaccggcaatggcacttttcggtcagactcatattctgcacgattgcgcgacaatggctcatgaacttccagccagttcgagccatctggttcagtggtgtattttactggctggtcgataatttgcacacgcgtcccaacaggaacattatcaaacagatatttgatatcgtcattgcgcagacgaatacagccctgacttacccggagcccaataccaaaattggcattggtaccatggatggcatacaacctgccaatataaatcgcgtacagccccatgggattatcggggcccgcaggaacaaatgcgggcaaactctcccctcgtttcgcatattcgcgccgagtgttcggcgttggcgtccaggttggagcttcttgtttacgttcaacggtagtcacccagttacgcggggtttctcgcccagcctggccgataccaataggaaagacttccacagtattactgtctggtgggtagtaataaagacgcatctcagcgacgttaacaacaatccctttacgaacagtgtcgggcaaaatcagttgctgcggaatggtgagttgcgagccagacttcggcaaaaaaacatcagcgcccgggttcgcttccagcatgttacttaacccttgcccgtattgtgcggcaaaagtctccagcggctgggtattgtgatcaggaacagttacagtaaacgactgccccactaaacggctaccctctggaggtaatggataagttaccgccaggctagtatggctggcaaaaagcagagcaaatgagcaaagaatatttacacgacgcatcatgtccctttcctatgtcgcgaaagctatccgttaagtatagcttttatcagacttttcgtttttaactgttcaaatcagaagtcgtattccccggtagaacaatattactggcagcaagttcgcccatgttgttgtatatcgcacaggcagcttcgatgatgggcatcgccagagctgcgccactcccctcacctaaacgcatctccatattgagataaggctccagccccaaatgcgagagcgctatacgcgcgcctttttctgccgacaggtgagaaggaatgagatacggtttgatcgcaggagacatctggcaggctgcgagcgcagcagcataagaaagaaatccatccagcaacacgggtaaaccgcaggaagcagcacctaacatcactccagctattccgaccaaatcaaatccacccacttttgccaggacatcaacaccatcctgaggatttggttgattcaacgtaatcgcccgacgcacaacatcaattttattagccagtttatctgtcggcaggtttgcgccaatcccaaccacttcttcaggatcccggccagtgattgtgctgactattgctgctgccggtgtcgtgtttgccatccccagttcacctacaccaaacagcgtgacaccgttttttgccagctcctgcgtataacatatgacgtccaaaagcaacttttcagcctgacggcgactcattgccggagctgaagcaatattgccgctacctcgtgcgacacgcatgttgataagcccggggataggctcagcagtatcaataccaacatcaattacgtggacgttagcgcccgcttgttctgccagcacacacacgccggttgttccacgggtcatattttcagcctgtatggctgtcacttcttttggagaaatagcgaccccttcctcccagacgccgtgatcggcacacataaccagtaccgcttttttgcccacatgcggtatgccattcaaccccggcattcctgccagttgtatggcaagcacctccagctttcccaggctaccaacaggtttgagtaacccgtcaatatgccgttgtgcacgcgacatagcggtagaatcgatggctgggatcgtattcagtaaatcggcaagtatttgcatctcacgtctctttatagcagtgccagcaggaagaccagttcaccaagctctatggctgctcccagcgtatcgcccgtttgcccgcccagcgtacgtttgagaagctgaccgaggatgaaaatcgccaccatcgtcaccaccatagcagccacaccatgcatacccggcaataatacggcagcaaaaatagcggctaagccgagtgtgacgcaggtttgtcgcccatcaattttgccaatgaacacattgccaagcccttcttcccgcgcataacgatgacgatacatcaataatgcggcagtcccgcggctgaccgcacatgctgccgccagcgatgcaaggatcgattcgccacgcagagccaactcgcttaacaccagaatctttgccagtaccacaaaaatcaatgccagaccgccgtgggtgcctaaacggctatcacgcatgatttccaacatgcgatcgcggctacgtgcagaaaatacgccatcacaggtatcagcgaggccgtccagatggaatcccccggtcatcagcaccagcacaagtacgctaaacagtgccgccagtggtgcgccacaccatgcctgcagcaccatgaagaccagcccgctaatcgcgccaagcaataatccaatcaaaggaaaagtaataataccgcgagaataatgctcgaaatccagtccctgggaccagcgacgcggtacaggcagacgcgtaataaatgagagcatcgcccaaaataatttactcatttgatttttactccaatacccgaaaccaccagccatacttcatttgccgcagcggccaactgctgatttacccgcccggcaatatcacgaaaatgtcgtgccagacgactctccggcacaatccccattcccacttcgttagtcactaatacaacctttgcggggcaacgttggcaggcagcaatcaacgactgaatctcagcattaatcgcctgttccatcgcctgataatcccattcatcagggtctttatcgccgccataatcaaacaacagattagtcaccattgtggtaacgcattcaagcaacacaacctcattcgggttaatgtctgcatgaattaattcatcaagatgttgccagcgctccactgtgcgccagtgctccgggcggccttgccgatgatgttctatccgtgcagccatctcatcatcaaggatttgcgaggtagcgatatacagaacctgtgaagagtccccaataagcgcctctgcgtggcgactcttcccgctccgtgcgccccccgtcaccaaaatcatcataccgactcctgattcaaatgtatgatggtattcattgaacagaacaatggatcccccaccgttgctgaccgcaaaacatttacgcgattaatactgcgcgtaatataattaaaaatccagcattctcaatccattacgaaataagatggcattacggaatagccagactttctcgtgttaacgtccgacaaaatgcgtcattgacagcggtttctgtggattgacacatttcattcagataatgaattaatgctactgccggaacaaccagcaaacgggcattgtgttctgaaatccaggctattgattcaacgtcagcgacagatctgcgctgtaaaagaacttgtaaaacaacgtaatagaattatccggaatggtggcgactatgcactagggaaggtgcgaataagtggggaaattcttctcggctgactcagtcatttcatttcttcatgtttgagccgattttttctcccgtaaatgccttgaatcagcctatttagaccgtttcttcgccatttaaggcgttatccccagtttttagtgagatctctcccactgacgtatcatttggtccgcccgaaacaggttggccagcgtgaataacatcgccagttggttatcgtttttcagcaaccccttgtatctggctttcacgaagccgaactgtcgcttgatgatgcgaaatgggtgctccaccttggcccggatgctggctttcatgtattcgatgttgatggccgttttgttcttgcgtggatgctgtttcaaggttcttaccttgccggggcgctcggcgatcagccagtccacatccacctcggccagctcctcgcgctgtggcgccccttggtagccggcatcggctgagacaaattgctcctctccatgcagcagattacccagctgattgaggtcatgctcgttggccgcggtggtgactaggctgtgggtcaggccgctcttggcatcgacaccaatgtgggccttcatgccaaagtgccactgattgcctttcttggtctgatgcatctccggatcgcgttgctgctctttgttcttggtcgagctgggtgcctcaatgatggtggcatcgaccaaggtgccttgagtcatcatgacgcctgcttcggccagccagcgattgatggtcttgaacaattggcgggccagttgatgctgctccagcaggtggcggaaattcatgatggtggtgcggtccggcaaggcgctatccagggataaccgggcaaacagacgcatggaggcgatttcgtacagagcatcttccatcgcgccatcgctcaggttgtaccaatgctgcatgcagtgaatgcgtagcatggtttccagcggataaggtcgccggccattaccagccttggggtaaaacggctcgatgacttccaccatgttttgccatggcagaatctgctccatgcgggacaagaaaatctcttttctggtctgacggcgcttactgctgaattcactgtcggcgaaggtaagttgatgactcatgatgaaccctgttccatggctccagatgacaaacatgatctcatatcagggacttgttcgcaccttccctagaacaccacaatttcgctctctcggtaaggcactgtcacagcattcaacagaatgtgacttgccagatttattagcgccaccagatgtttaaccgggtaaccacgacccagtcggggatatattccatcttctcgctgacatcatcaagaataaaaaggtttatcacactcagagcaacgttcttcagcaggcgggataattcttcaacatttagaagatgtgttattaaaggcatacaaactggacgtattgtattttcttttggtggttgacctaaggtagcagtttatcctgatgcgctgagatttctgtaatatctacgtcaacattctcctcgaatagaaaatgcagccccggcaagtgattcacattttttaacaaaacgttgttagcgtgccattttcagaagctctccaagaaagcgaattcttttctcaaattctgcattctcagacacagctttctactccatggtaatggcccaaatacgaagttgctcaggatcattagtggtgctgagaagttaaataaccatgcggagtaccactcgtcatcacgtatttatatatcatgaagctattgttgtgttttgtacatcagtagatatattctgatatactccttttgctagacataacctttcacctgcttgcaaagcttctgtgttctgacattgccaaattgttgcaattctgtatccagccttctttcagtcatagcttcgggccgcgataagactcactgatctgaccctgattcctcttgcagactttatagaccaattaaaatgcagtttctgcaggtcaacgtctgaccatcattgtcatcactctggccattagagtaaccttctgcattcatccttttgtaaaaagtttatattagtatcagcaattaaccggacctgatactgatatgagtcttaccgcatatacggtcaatttcagcaattaattacattatccacgccaaagtatttgtcatcacaatgatggtaccttctttcagacaccattttttcaactccgttttccacggaccgcactcttatgtcaagagtgcggtccgtggatacaaccagagaccgactgacacgagtcagaggaaacgacggatatgttcagtcgtaaaatatctatcaaaaaacatgattaaggtcaaaaatgtttgatatttacaatttatgaagatgacaataattatagatatatgagaacataaatgaaaataattatcattacagtaatcatttgtactttgtattaatgagggatgaaatgttatataatataccttgtcgaatttatatcctttccactctgtcattatgcatttctgggatagtttctactgcaaccgcaacttcttcagaaacaaaaatcagcaacgaagagacgctcgtcgtgaccacgaatcgttcggcaagcaacctttgggaaagcccggcgactatacaggttattgaccaacaaacattgcagaactccaccaatgcctccatagccgataatttgcaggacatccccggagtagagataacagacaactccttggcaggccgtaaacaaatccgcattcgtggctggatttgcccctatatttccagacatctgttatcacttaacccattacaagcccgctgccgcagatattcccgtggcgagcgataacccagcgcactatgcggatgccattcgttataatgctcgaacgcctctgcaaggttctttgctgccgttaacccgtctggtttgggcatgatactgatgtagtcacgctttatcgttttcacgaagctctctgctattccgttactctccggactccgcaccgccgtgttcttcggttcaagtcccaacatccgggcgaactggcgtgtttcattagcccggtagcatgaaccattatccgtcagccactccactggagacgacggaagatcgttgccgaagcggcgttccaccgctcccagcatgacgtcctgtactgtttcactgttgaagccgccggtagtgaccgcccagtgcagtgcctcacgatcacagcagtccagcgcgaacgtgacacgcagtctctctccgttatcacagcagaactcgaacccgtcagagcaccatcgctgattgctttctttcacggccactctgcctgtatgtgcccgtttcgatggcggtacagcaggttttcgctcaagcaacagcgcattctggcgcatgatccggtaaacacgtttggcattgatcgcaggcataccatcaagttctgcctgtctgcgaagcagcgcccatacccgacgataaccatacgttggcagctctccgataacatggtgtatacggagaagcacatccgtatcatcagtgtgacgactgcggcggccatccatccagtcatcggttcgtctgagaatgacgtgcaactgcgcacgcgacacccggagacaacggctgactaagcttactccccatccccgggcaataagggcgcgtgcgctatccacttttttgcccgtccatattcaacggcttctttgaggagttcattttccatcgttttcttgccgagcaggcgctggagttctttaatctgcttcatggcggcagcaagttcagaggcaggaacaacctgttctccggcggcgacagcagtaagacttccttcctggtattgcttacgccagagaaataactggctggctgctacaccatgttgccgggcaacgaaggagaccgtcatccccggttcaaagctctgctgaacaattgcgatcttttcctgtgtggtacgccgtctgcgtttctccggccctaagacatcaatcatctgttctccaatgactagtctaaaaactagtattaagactatcacttatttaagtgatattggttgtctggagattcagggggccagtctagtggcgaagcatcctcccgtgttttaattctcattgatggtcaggaggtaacttatcagcgcgccggagataattatggtgtgggactgttgatagatgagtctgcgctggagcgtgttgaggtagtgaaaggtccatattccgtactgtacggttcacaggcaattggcggtattgttaacttcatcaccaaaaagggtgaatctccggactccctatatcacttaaattgatacaactttttagagtagtcattagtgaacagataattgataactcagaaccagtaaaatgcaaaagacgcaccacgctgggaaaatcgctgctattcagcagagttttgtatcgagaatggtggccagccacttattgctctcgcgtaagcgggtaccgtgacattctgcctgaacttgacctggtactgtggctgattaaagccgatgaccgtgccctgtctgtggatgagtatttctggcgacacatcctgcagtgcggacatcagcaggtgctgtttgtggtgacgcaggccgacaaaacggagccctgccatgaatgggatatggccggtattcagccttctcctgcacaggcacagaatattcgcgaaaaaacggaggcggtattccgtctgttccggcccgtacatccggttgtggccgtatcggcccgcaccggctgggaactggatacgctggtcagtgcgctcatgacagcgcttcccgaccatgccgccagtcccctgatgacccgactgcaggacgagctgcgcacggaatctgtccggtctcaggcccgtgaacagtttaccggtgcggtggaccggatatttgacacggcggagagcgtctgtattgcctctgttgcacgcacggttctgcgtgccgtccgtgacacggtggtctctgttgcccgtgcggtatggaactggattttcttctgaacctgtcgtgactgatgccctccctgactctgagtctgctcacaaaagcactgttttcgttactgtctctcttgtccgtgcaatagctcaataatagaataaaacgatcaatatctattttatcgatcgtttatatcgatcgataagctaataataacctttgtcagtaacatgcacagatacgtacagaaagacattcagggaacaacagaaccacaattcagaaactcccacagccggacctccggcactgtaaccctttacctgccggtatccacgtttgtgggtaccggcttttttattcaccctcaatctaaggaaaagctgatgaaacgacatctgaatacctgctacaggctggtatggaatcacatgacgggcgctttcgtggttgcctccgaactggcccgcgcacggggtaaacgtggcggtgtggcggttgcactgtctcttgccgcagtcacgtcactcccggtgctggctgctgacatcgttgtgcacccgggagaaaccgtgaacggcggaacactggcaaatcatgacaaccagattgtcttcggtacgaccaacggaatgaccatcagtaccgggctggagtatgggccggataacgaggccaataccggcgggcaatgggtacaggatggcggaacagccaacaaaacgactgtcaccagtggtggtcttcagagagtgaaccccggtggaagtgtctcagacacggttatcagtgccggaggcggacagagccttcagggacgggctgtgaacaccacgctgaatggtggcgaacagtggatgcatgagggggcgatagccacaggaaccgtcattaatgataagggctggcaggtcgtcaagcccggtacagtggcaacggataccgttgttaataccggggcggaagggggaccggatgcagaaaacggtgataccgggcagtttgttcgcggggatgccgtacgcacaaccatcaataaaaacggtcgccagattgtgagagctgaaggaacggcaaataccactgtggtttatgccggcggcgaccagactgtacatggtcacgcactggataccacgctgaatgggggataccagtatgtgcacaacggcggtacagcgtctgacactgttgtgaacagtgacggctggcagattgtcaaaaacgggggtgtggccgggaataccaccgttaatcagaagggcagactgcaggtggacgccggtggtacagccacgaatgtcaccctgaagcagggcggcgcactggttaccagtacggctgcaaccgttaccggcataaaccgcctgggagcattctctgttgtggagggtaaagctgataatgtcgtactggaaaatggcggacgcctggatgtgctgaccggacacacagccactaatacccgcgtggatgatggcggaacgctggatgtccgcaacggtggcaccgccaccaccgtatccatgggaaatggcggtgtactgctggccgattccggtgccgctgtcagtggtacccggagcgacggaaaggcattcagtatcggaggcggtcaggcggatgccctgatgctggaaaaaggcagttcattcacgctgaacgccggtgatacggccacggataccacggtaaatggcggactgttcaccgccaggggcggcacactggcgggcaccaccacgctgaataacggcgccatacttaccctttccgggaagacggtgaacaacgataccctgaccatccgtgaaggcgatgcactcctgcagggaggctctctcaccggtaacggcagcgtggaaaaatcaggaagtggcacactcactgtcagcaacaccacactcacccagaaagccgtcaacctgaatgaaggcacgctgacgctgaacgacagtaccgtcaccacggatgtcattgctcagcgcggtacagccctgaagctgaccggcagcactgtgctgaacggtgccattgaccccacgaatgtcactctcgcctccggtgccacctggaatatccccgataacgccacggtgcagtcggtggtggatgacctcagccatgccggacagattcatttcacctccacccgcacagggaagttcgtaccggcaaccctgaaagtgaaaaacctgaacggacagaatggcaccatcagcctgcgtgtacgcccggatatggcacagaacaatgctgacagactggtcattgacggcggcagggcaaccggaaaaaccatcctgaacctggtgaacgccggcaacagtgcgtcggggctggcgaccagcggtaagggtattcaggtggtggaagccattaacggtgccaccacggaggaaggggcctttgtccaggggaacaggctgcaggccggtgcctttaactactccctcaaccgggacagtgatgagagctggtatctgcgcagtgaaaatgcttatcgtgcagaagtccccctgtatgcctccatgctgacacaggcaatggactatgaccggattgtggcaggctcccgcagccatcagaccggtgtaaatggtgaaaacaacagcgtccgtctcagcattcagggcggtcatctcggtcacgataacaatggcggtattgcccgtggggccacgccggaaagcagcggcagctatggattcgtccgtctggagggtgacctgatgagaacagaggttgccggtatgtctgtgaccgcgggggtatatggtgctgctggccattcttccgttgatgttaaggatgatgacggctcccgtgccggcacggtccgggatgatgccggctgcctgggcggatacctgaatctggtacacacgtcctccggcctgtgggctgacattgtggcacagggaacccgccacagcatgaaagcgtcatcggacaataacgacttccgcgcccggggctggggctggctgggctcactggaaaccggtctgcccttcagtatcactgacaacctgatgctggagccacaactgcagtatacctggcagggactttccctggatgacggtaaggacaacgccggttatgtgaagttcgggcatggcagtgcacaacatgtgcgtgccggtttccgtctgggcagccacaacgatatgacctttggcgaaggcacctcatcccgtgcccccctgcgtgacagtgcaaaacacagtgtgagtgaattaccggtgaactggtgggtacagccttctgttatccgcaccttcagctcccggggagatatgcgtgtggggacttccactgcaggcagcgggatgacgttctctccctcacagaatggcacatcactggacctgcaggccggactggaagcccgtgtccgggaaaatatcaccctgggcgttcaggccggttatgcccacagcgtcagcggcagcagcgctgaagggtataacggtcaggccacactgaatgtgaccttctgacagaaccatcgcctctctgtggtcccggtcatcatgaccgggacccggaccggcgcaacggatcttcaacgccacattcgctggc

SEQ ID NO: 11 - protein, 181 aa, Escherichia coli
  complement of position 3153-3698 of seq id 10
MMILVTGGARSGKSRHAEALIGDSSQVLYIATSQILDDEMAARIEHHRQGRPEHWRTVERWQHLDELIHADINPNEVVLLECVTTMVTNLLFDYGGDKDPDEWDYQAMEQAINAEIQSLIAACQRCPAKVVLVTNEVGMGIVPESRLARHFRDIAGRVNQQLAAAANEVWLVVSGIGVKIK

SEQ ID NO: 12 - DNA, 12790 bp, Escherichia coli
tcactatagatattgatcattaagttgattagacccaaaatcatgattagacctatcatttaaatgattaatagattgcatggagatactgaatgaagcgtgaagaaatcgctgatctgatggcgtttgtcgtcgttgcagaggagcgtagcttcactcgtgcagcagcccgcctgagcatggcgcagtcagctttaagccagatagtgcgtcgtatagaagaacgattgggattgcggcttctgacgcgaaccacgcgcagcgttgttccaactgaagcgggcgagcatcttttgtctgttcttggccctatgttgcatgacatagattcagccatggcatccctgagcgatctgcagaaccgcccatccgggacaatacgtattactactgtagaacatgcagcaaaaacgatattgttaccagcaatgcgcacattcctgaaatcgcatcctgaaattgatattcagctcaccattgattatggtttgaccgatgtcgtttctgaacgttttgatgcaggcgtccgtctgggtggggagatggataaagatatgatcgccattcgaatcgggccagatataccaatggctattgttggctcaccggattatttttctcgccgaagtgttccaacgtcagtgtcacaattaatagatcatcaggcaattaatttgtatcttcccacatcgggtacagcaaatcgctggagattaatacgcggtggacgtgaagttcgtgttcgcatggaaggtcagcttttactgaatacgatagacctgatcattgatgctgcaattgatgggcatggattggcgtatctaccttatgatcaggttgagcgggctattaaagaaaaaaaactgatacgtgttttggataaattcacaccagatttacccggttatcacctgtactatccacaccgtcgacatgctggctcggcattctcattatttatagataggctgaagtataaaggtgctgtttagcactacttgctgatacattaatttaattcttctcttaacgtattctcagttcctttcaacgttttggtcattttttattcttcgtacaatggcgacagatgctgattatgataccgaaaacgggtttgaacgtgcgaagcccgaacgtagtgttcggagttctatgtgctttaccgcattttggagactattatttacactaaatctgatttgatatattgatacttaaaacatttgatgcttcctttgtcacttttttgatggaagttgtttgcatttctttaaggcgaaacaaataattacgcatcaattttaatgtcggttagagggaaacttatgaagcactctgtttcagtcacgtgttgtgcgctgttggtcagcagcatttctctttcgtatgctgcagaagttccgagcggcacagtactggcagagaagcaggagctggtgcgccacattaaagatgagcctgcgtcgctggatcccgctaaagccgtgggcctgccagagattcaggtcattcgcgatctgtttgaaggtctggtgaatcagaacgaaaaaggggagattgtccccggcgttgcgactcagtggaaaagtaatgacaaccgtatctggacttttaccctgcgcgataacgcaaaatgggcggatggcacaccggtaacggcgcaagattttgtctacagctggcaacgtctggtggacccaaaaacattgtcgccatttgcatggtttgccgcgctggcgggaatcaacaacgcacaggcgattattgatggtaaagctacgcctgaccagcttggcgtcaccgcagttgatgcccatactttgaaaattcagcttgataaaccgttgccgtggtttgtgaatttaaccgctaactttgccttcttcccggtgcaaaaagccaacgtagaaagcggtaaagagtggacgaaacccggaaatctgatcggcaatggcgcttatgttcttaaagagcgcgtagtcaatgaaaaactggtcgtggtaccgaatacccattattgggataacgccaaaacggtactgcaaaaagtgaccttcctgccaattaatcaggaatccgcagccactaagcgttacctcgcgggggatattgatatcaccgaatccttcccgaaaaatatgtatcagaagctgttgaaggatattccggggcaggtttatacgccgccgcagctcgggacctattattatgcgtttaacacgcaaaaagggccgacggcagatcagcgcgttcgtctggcattaagtatgacgatagatcgccgcctgatgaccgaaaaagtattagggacgggcgaaaagccagcgtggcattttacaccagatgttaccgcgggatttacgccggaaccttcgccgtttgaacaaatgagtcaggaagaactgaatgcgcaggcaaaaactttgttgagcgcagctggttatggtccgcaaaaaccgctgaagctgacgcttttgtataacacttcagaaaaccatcaaaaaattgcgattgctgtagcatcgatgtggaaaaagaaccttggcgtagatgttaaattgcaaaatcaggaatggaaaacctatatcgatagccgtaacaccggcaattttgatgttatccgcgcctcgtgggtgggggattataatgaaccctccactttcctgacattattaacgtcaacgcattcaggaaatatttcacgctttaacaatccggcatatgacaaagttctggcccaggcatcgacggaaaataccgttaaagcgcgtaatgccgattacaacgcggcagaaaaaatcctcatggagcaagcaccgattgcaccaatttatcaatataccaatggacgattaatcaagccgtggctgaaaggttatcccattaataatcctgaagatgtggcgtacagtcggactatgtatattgtgaagcattgatgtgatgggaactggcgttacccttgtgcataacgccagtgatgtctgatttagcgaccctgttccggcggtgtaatgttatccatatacagcgtctggctggggaaggcaaagtccgcgccgtgtgactgtacaatatcgataatcttcaaataaacgtcttgctgtgcagcaagccattcagcccataccgtggttttggtaaagcaataaaccataatattcaatgaagagtcagcaaactggttgaaataaaccagtaaggtttgtcgctggtcgatggccgggtgatttttcagcatctcacgtacagcttcgacaataacgcccacttttgccgcatcctcataacgtaaaccaatggtcgtggtaatgcggcggttggtcattcgtcctgggttttctacgctgatcgacgaaaacagcgagttcggtacgtacaatggacgattatcaaaggtcgtaattttggtaattcgccagccaatttccgctactgtaccttcgatatttctgtccggtgaacggatccagtcgccaatactgaaaggacggtcgaaatagagcataatcccggaaaagaagttactcagaatatctttaccggccataccgacagccagaccaccaataccaccaaaggtcagcaagccagaaaggctcatgccgaaatgttcgccataaagcagaacaagcaccacaataatggtgattttgatgatacgcgacataatccgcgcactggtgatatcgcgaccttttttaatctgctgtttttcaaactgattaatcagcagaaatagcttaatcgtcagaataaccgcaatcagggacgtacagataaaatcgataacgcctggggtgataaatttgagtttatagttttctataacataattaataatgctaccaacagcactgataattatggtgtagattaaaaattgcaccgcatggaataaaaatccttttcttttacgatttccacggcgaaaccaaaagctcatcagaatcaatgctgcgcagctaccgaaaataatgaccagattaagcgcattatttgtaaacagttcagcgatcattgttttatcaggctcctccagataattgtcgtcatgccggaaacccctggcggggctattttaccgcgacaattcattcagatcatcaatagtcagggaaggaagtagcaacattagctaaggaaggtgcgaacaagtccctgatatgagatcatgtttgtcatctggagccatagaacagggttcatcatgagtcatcaacttaccttcgccgacagtgaattcagcagtaagcgccgtcagaccagaaaagagattttcttgtcccgcatggagcagattctgccatggcaaaacatggtggaagtcatcgagccgttttaccccaaggctggtaatggccggcgaccttatccgctggaaaccatgctacgcattcactgcatgcagcattggtacaacctgagcgatggcgcgatggaagatgctctgtacgaaatcgcctccatgcgtctgtttgcccggttatccctggatagcgccttgccggaccgcaccaccatcatgaatttccgccacctgctggagcagcatcaactggcccgccaattgttcaagaccatcaatcgctggctggccgaagcaggcgtcatgatgactcaaggcaccttggtcgatgccaccatcattgaggcacccagctcgaccaagaacaaagagcagcaacgcgatccggagatgcatcagaccaagaaaggcaatcagtggcactttggcatgaaggcccacattggtgtcgatgccaagagtggcctgacccacagcctggtcaccaccgcggccaacgagcatgacctcaatcagctgggtaatctgctgcatggagaggagcaatttgtctcagccgatgccggctaccaaggggcgccacagcgcgaggagctggccgaggtggatgtggactggctgatcgccgagcgccccggcaaggtaagaaccttgaaacagcatccacgcaagaacaaaacggccatcaacatcgaatacatgaaagccagcatccgggccagggtggagcacccatttcgcatcatcaagcgacagttcggcttcgtgaaagccagatacaaggggttgctgaaaaacgataaccaactggcgatgttattcacgctggccaacctgtttcgggcggaccaaatgatacgtcagtgggagagatctcactaaaaactggggataacgccttaaatggcgaagaaacggtctaaataggctgattcaaggcatttacgggagaaaaaatcggctcaaacatgaagaaatgaaatgactgagtcagccgagaagaatttccccgcttattcgcaccttccctaactaatcaatgcgttgattgtaaatccagctaagaggtgaggttttcagagcagacaacggtgaaatgtcatggtattgttacgtttaggtaacaagaaatttgtctgcacaaggattacatcatgattatggcgaaactgaagtcagcgaaagggaagaaatttctctttggtttgttggcggttttcattattgcggcgtcggttgtgactcgcgcgaccatcggcggcgttatagaacagtacaatattccgctgtctgagtggacgacatcaatgtatgtgattcagtcatcgatgatttttgtttatagcctggtctttactgtgttgctggcaatcccgttgggaatttatttccttggcggcgaagagcagtaagtaaaaaataggcccgataactcgggccttgtcagttattgaagagtcgttaatcgtcttcttcgtcatccagttcaacgggtgtctgatactggtcaggtttaatgaccagcaggtcgcagcgaagatgatcaatcacctgttccgccgtgttgccgaggaatgctgctgaaataccggtgcgtcctaccgtgcccagaaccacaatccccgcctgtaagtgctccgccaaatcaggaatcacctcttctggcagacctttttctacgtgcgtcatgttttcattaatgccgaatttctgccgcagggctttcattgccagcaaatgttgcccacgaatggcatcgttataaacgctcgggtcaaattccggcagttcaatcgcgatattaattggcgttaccggataagcgccaaccagatgaacttcggtatggttgacttgttctgccagttcgatcgtctctttgaccagtttttcattgagcgcattatgatacggctcttcactggcgagattcaccgccaccagcgccttgcctccttccggccacggctggtctttcaccatccacaccgggcttgggcatttgcgtaacagatgccagtccgttggcgtaaaaatcaccgcttccagacggtcatgttggtgcgccatttttagcaccaaatcgtgtccgccgctgatcacttcctgaatgatggcttcgaaaggacggttatgccagaccactttaatttcaatgggaacgccagcattgagataatattttgcctgctcgtggatccaggctgtacgctggctgatgacgccctgacgcatagcggtacgttcgtccggggagagcagggtggtcatttcgtatgagaagtcatagatcggcaaaaaggctttaattttgccaccaatccgttgatgtaaataaacagctcgccgcaatgctggttggtcgtcctggttaggatcgataacaacgagcatgttctgatacatagccatacagggtctccttacaacaactgtcaacgcagtttgtaattaaaagattaacccatatctggtgaatgaaacagtgatgaaccttctgccagatcaataaatcagaaaaatttaatgatatgacagaaggatagtgagttatgcggaaaaatcaggcaacgttacgcgtatgaccagcaagctgggccagcgcatcgttattttcgatggtgatgtatttacctttgactgccagcatgccgcttttctggaagcgacccagcagacggctgatggtttctaccgtcaggcccagatagttaccgatatcgccacgagtcatcgtcaggcggaattcacgaggggagaagccgcgttgggcaaaacgacgggacaggttgtagatgaatgcagccagacgttcctcggcatttttcttcgacaacagcaggatcatgtcctgatcgcctttgatttcaccgctcatcagacgcatcatctgctgacgcagattcggcattttaccggacaaatcgtccagcgtttcgaacgggatttcacataccatcgaggtttccagcgcctgcgcgaagctcgggtgatggccgctgccgatggcgtcaaatcccaccaggtcgcctgctaaatggaaaccagtgatttgctcgtcgccttgctcagtgatggtataacttttaatcgtaccggagcggatggcataaagcgatttaagttcatcaccagccttaaacagcgtctggcctttctgaataggcttcttccgctcaatgatattatcaagctgatcaagctcatgttcgttgagtgtgaacgggatgcaaagctggctgatgctgcaatcctggcaatggatagcacaaccgccagactgaatgcgccgtataattcgcttttccgggatcataggtctgctcaagccgtaattgatatttgtcaattttaacatctttttagggagcaagtaagtctaagcaaaccttaacagcagagaattccgatattagatgtaaatatatgtctatctatttgaaaacccttaagttgttaagggtaactttacataaaagtgtgaacaagctggcacaaattgtttaatgtttacagcaaaagataaccttcatggcgcaataaccactcttttcgctgaactccgcctgcatatccggtcatggtgccgtttcggccaataacccgatggcaaggtacgacgatgctgatgggattcgatccgtttgccgcaccaacggcacgcgccgcgccaggacggcccaattgctcagccagttggccgtaatgcattacctgcccgcaggggatagtgcgtagtgttttccagacttcgcgctgaaatggcgtcccccccgtagcagtgggaagcgtatcaataatgctaagattaccggcaaaatattcacgaagcttgtcgcttaaaccgcctggattggtggcagaaatgcgctcatagccttctttgcgataatggatgtccagcagctgcaccatgcgttcgctgtactcttcccattcaaccgcccgcaggcgaaattgctcatcgcaaatcacccacagtggacccagtggcgtggcaattttttcttcaagtaatctcagcatccgttctctcttaagacaaacgtgggtaaatacccggacctatcggcagaccgacaagataccacgccagcaacatcagcagccataccaccaaaaagataagtggatagggcaagactaacgaatagtaagtacccagtttcgcgtctggtttgtagcgttgcaggaatccaagaaacagtggaacaaaaggagataccggcgctaaaggcaatacggatgagtcggcaatacgaaagaggatttgcgcaaatgccgggtgaaagccaagtagcataaacattggtacgaaaatgggggcgagaatcgaccagattgcggaaccgctggcaataaacatgcataagaaagaggaaagcaacgccagaccgacaaacgccgggatgccgctaagccctgaactttccagtatatcggtcagccccacggcgatgaatttccccatgttgctccagttaaacatggcgacaaattgggcgaggggaaaaaccatcacgataaatcccgccatctctttcatcggttcaatcattaaatgcggtaaatccgcctgacgtcgaattgtgcgggtagcgatgccataagccagcgagacaacaaagaaaaaaagaatgatcagtggcacgatacctttaataaagggtgatggcatcacggtgtgattaatcggatcgcgcaatatcccgttttgcgggatcaccatcagcgcaatcgcagcaataaaaagtagcgatacgacacctgctatgcgtaaaccaaaacgctgactttcggtcaatgtctgcagtttctcatcgctgtttccctgccattgacctaaccgtggctcgatgattttgtcggttatcaggccgccaacaatcgtcagtacgactacggagctggccataaaataccagttatcaattacactgacgtgcatttgcggattgaacgcagctgccgcttccgtgctgatccccgacagcaacacgtcggttgtgacaatcagtaaattagccgtaaagccgcaacctacgcctgcaatggcagccagtaaacctgcaactggatgcctgcccaccgccagaaaaatcagcgcacccatcggtggcatgatcactaacgccgcatcggaagaaatgtggctgaaaaaagcaataaacagcaccatataactggcgtagcgggcattaacatgcgatgccattttaaccattagtgctggcagtaagccgacgcgctccgccagaccggcacctaaaaccagcgccaggatcgcaccaagtggagcaaaaccgctaaagtttttaataacattgggtaaaaaccagtgtaatccttccacactgagcaggtttttcaccacgaccggcgtaccatcggtcgggtttttcgcactgacgccaaaggccgacaaaattgccgtcgtcaccatgagtacgataatcaaatagataaagagcagaaaaggatggggaaccttgttaccaattctttcgacccagccatagagcttcccggattgggaggacgacggtatggatgacatactcatgggcattcctcggttgttgtgtttgcgttgttgttgttattttaaaggtgacggtgtcacgtttttcgggatagggcagtgatacggttgcgtgtccgttacttgctgatgctcttgttggcattcttgcaatagccctgaatcaaggaagagattgactgtggttgctgccatagttttcgccgccagcagcattcctttatgagcaatagatgttcgcccctggctaaccagttgccacgtatgtagcggtgtaccgacggcaaaacaggggctgaaacactgggcaacaggcagtttccaactgacgtcgccgacatcagtcgatgccgcaagcacgttatcggtggcggcatatggagcgacttcattcgccagtaccgtttcacgatgacgtagtgcaaaaaccttgccgttttcgccaccggttgcggcgatattattcagactgttttgccgatcgttggaggtgagcgtagcctgaatttgtttcgcaaaagccagttcttcggagttccattccggggtaccaaaatgggatagggcctggtacatggcattttctaaggtgcgattcgggagataactggaacaggctttgtcgaagcggcattcaaccgtggtttcggtcatcaatgccgcaccttcggcgattttggcgacccgatcataaatatgctgcacgtcggtcatttcgggggcgcggataagataaagcacttctgcctgcgcctggaccacgttgggcgagatcccgccgctatttgtgatggcatagtgtacgcgcgctttttcaataatatgttcgttgaggaagttggtgccagtggtcatcaacgttacggcatcaagggcgctgcgtcccaaatgaggggaattcgcggcatgtgctgcgatccctttaaagcgccatgatgcctgaatgtttgccagcgtgcgggtattgaacataccggcaaaggcttccgggtgccaggtgagtgccgcatccacatcatcaaataccccctcgcgaaccatgaacgttttacccgagccgccttcttcgccaggacaaccataaaagcgcaccgtgccgccttgcccatattgttccagccatttcttgacggctattgcagcggcaaaggcggcggttcccagcaaattgtgtccgcaaccgtgaccattttcaccgggcgtcacggatgtaggttgcgcgcaacctgcttgctgacttaaacctgccagggcgtcatattctcccagcagggcgataaccggtttgccttgaccaaacgaagcaataaaggcatttgggatattgcctacgttgcgggtaacggtgaagcctgcagattccagcgccgaagccagatgctccgctgaccagaactcttcaaaacgtgtttctggatgatcccagatttgatcggcaatatcggtataacgttggcgatcggcttcaatcgcatcgtcgataaaacgatagatttcctgcatcagatacctcgcgtccagggaaaattgagcgcggtgcgcgccagcgtttcgacggcaatagcgagaacctgctcgtcaaaatcgaatttttcgttgtgatgacctgccgccagctgtgtgccaaacaccacgtaggaggcttgcccttgatgttgctgcacgcgggccatcattaatgtggcatcttcggaacccgcaggcgcttcaacacgttcaatggcctgattgacccccgcgacctgagccgcctgactttgcaaccatgcgacccattgcggcgaaggagaactggcggtagctgcacccatcagacgagtttcaacgccgacaccatacatggttgctgcgccctgaatcgcttgttgtgcacggtcaaaaacatattgattaatgacgtcgctggccccgcgtgtttccactttcagcaacgccgaggcaggaacaacgttacgaccgcttcctgcctgcataacgcccacgtttactctggaagctccttcgctgtgcggggcgattgcatgcagtgcaagagtggcttgtgctgccgccaacaaggcattgtgaccgtcttctggttttgcgcctgcgtgagcggcggtaccggtgaagtgcgcgtcaaatttggtggttgccataaaattatcactgccgcacaccacggtgcccgcaggtacgccagtgccaatgtgcacggcagtaaaataatcaacatcatctacgacacctgcatcgaccatcgcccgcgcgccacgcgtaccttcctctgcaggctgaaaaatcagtttgatgacgccatgtagtccggactcgaactgtttaagggtatgcgccagcccaagcccaatggcggtatgtccatcatgaccacaggcatgcatcattccggcgttacatgacgcaaaaccgtcgcggtaggggcgatggctgacatcctgctcttcactgagatccagcgcgtccatatcgacacggaaagccatcaccggaccggggcgaccggtatccagggtggcgacgataccagtgaaaccaccttcaaaagccgcaatccattgtgctagcgcaccctgttgacgagcgcgctcgaattcgcgttgtagagtgaattcatcaggtaatcccatccggctactttcattaactacttcgcgacccagcgccagtgaatagccgagctggtgcaattcttccgcaacaagggtggcagtgcggaattccacccagccagactctgcatagtgatgaaaatcacgtcgccagtgcgataattttggggcaagcgaattaacaaattgattcaaagactccataacctttcccgtcatcagtaaaaagtgtgacccggttcacgtagcgatagtttttacttatcactaactgatttttcacagttttaaccgttcataaattaccctgacacaatcatctgcatt

SEQ ID NO: 13 - protein, 294 aa, Escherichia coli
  complement of position 3733-4953 of seq id 12
MKRAVTGGVSSGNNVASRGRSGTSKDSGMRSHVWGNVKDTTGDRKVVRMSDASYASMAADAGSAYNNRVGAGSGGGSRVGADAMRGRGKAVGYVVTKAMASGVSACATKHGVNYSSSACATSAHCGNAVGKDVAGGGCWMACDAMGASTKYNDTKASRTYDAHRDGVAGGGGMVVVHAARGAHYAVGYGATSDGADMVASGGAVRCMKMAMHGVDTDYNSHGTSTVGDVKAARVGDKSASATKAMTGHSGAAGVAYSMHGASNDAAGNVTTTDRTTVMSNSGGGTNATVMRKKD

SEQ ID NO: 14 - DNA, 10244 bp, Escherichia coli
aaaacatcccttaaaaccaatctaatctttttcttcctctgtgtatttgttccccatatggcgtcataatttacgctacgtaatacgggatagttacgatacgcagcgatagcgctaagttttagttaaaatcccccatcagcgggatatggggatctctgggaggttcaggttttagcatcgcgactttaatacgacagacgctggtgacgatgatgccaagtagtgactcttccgaataaggttcccactgaccaattggcgcgcgcttcgcaataaaatctcccttcgcccagtattgggaaaagtagatacattcaaactgtgtacgctgtttcgtctcacagttcacgacattgctggccgatgagctgaccattgggcctatccgggctgtcccgatggatattacgccgaagtatgtgggaattgccagcggattgatgaacgccggttccgctgtcgccgacattatttcacctatcgcctttggcattattatcgacaaaacaggcaactggagtttaccattctacggttccgtcgcattgcttgttattggtatattcctgacgttcttcatgcgtccagataagtcattgtaaaagtcgaatcagggctgaagtggcacactgaatttggccacctgaacagaggtgatatgctcacctcagaacaacacaggtgctccaatgaaaaaaagaaatttcagcgcagagtttaaacgcgaatccgctcaactggttgttgaccagaaatacacggtggcagatgccgcgaaagctatggatgttggcctttccacaatgacaagatgggtcaaacaactgcgtgatgagcgtcagggcaaaacaccaaaagcctctccgataacaccagaacaaatcgaaatacgtaagctgaggaaaaagctacaacggattgaaatggagaatgaaatattaaaaaggctactgtagattcaatctgtcaatgcaacacccctttcaattatctctttcggtgttttgaacttcagtgtctttctcggtctgttgtttagctgagcagcaaccagatctagttcatgttgagtatattgggcaagacatgtctttttaggaaagtactgccgaattagcccatttgtgttctcatttgttccccgctgccaaggactctgaggatcgcagaagtaaactttaacgccggtgctgacagtaaattctagatgtctggccagttccattcctctgtcccatgtcagtgattttctgagttctgacggtaaactcaggaatttgtcggtaagagcctgatttactgagacagaatctttgcccctgagtctaaggatgatcgtataacgtgattttcggtctacaagtgtggctatatgagagttttttgtacctgagactaaatcgccctcccaatgccctagagagcgtctgttatcgatatttcgggaacgttcgtgaattggtgttccgttcactatgttaatcgtacctctttcgcctttgcgggtatgacgcctgccatggcgaaggctatgcgaccgtcgcagatgctgtatattcaggtggtgtagcgcttcacggctacgaaagtacagcgttttataaattgtctcaggtgatattcgcagcgttttttgacgtggttttgttcgccttaaccatcctgatatttgctctggagaccatttcatctccagcttttccagaacaagctttcgcaatggtaaattttgatccagtaagcacggttttggccttttcgccattctgttggctcggttattagcatcaacagctttgtaatagcgtctgccccgattacgctgaacttcacgtgagatcgtcgaaggactgcgattcagcgcagtagctatcgcacgaatgctcattttggctgacaaaccagctcgtatctcctcgcgctcagacagtgtcaggtgagctacagcccgcttacgctcatggggttttatgccgccagtatcccttaacatagtgaagatcgttccgggttttgaacccaggatattcgctatttcactgaagcctgttccgttcttccatagttcaaaaacagaggctttttcctctgctgtaaatgttcgtctcattcaaaaaacctccgcaaccccatgttttcacataactgttgcgttgaccaattgaatctacagttgctttttttaatatatctcgctcaaggcgagcttcatttaacgccttacgcagttgcagaatttcagattccagttcagccaccgtgcgggaaccaggagtaccgagcccttttctggcggcggtaacccattgtcctaaagtgccttcaggaagagataatcgggaagcgccttcactgatcgaaagttgattttcaagaaccgttctgacagcttcggctttgaactttttagagtaacgttgggtttttctgctcattattagctccttctgatgccattctatttcaggaaggagtgtccgttaaactcaggctacctcaggaaaaaccgtcctgaaaaaccagacggcagacgggctgtattacgcagtcaggtacttgagctacatggcatcagccacggttcggccggagcaagaagcatcgccacaatggcaacccggagaggctaccagatgggacgctggcttgctggcaggctcatgaaagagctggggctggtcagctgtcagcagccgactcaccggtataaacgtggtggtcatgaacatgttgctatccctaactaccttgaaaggcagttcgccgtgaccgagccaaatcaggtgtggtgcggtgatgtgacctatatctggacgggtaagcgctgggcgtacctcgccgttgttctcgacctgttcgcaagaaaaccagtgggctgggccatgtcgttctcgccggacagcaggcttaccatgaaagcactggaaatggcatgggaaacccgtggtaagcccgtcggggtgatgttccaagcgatcaaggcagtcattatacgagcaggcagttccggcagttactgtggcgataccggatcaggcagagtatgagtcggcgtggaaactgctgggataacagcccaatggagcgcttcttcaggagtctgaagaacgaatgggtgccagcgacgggctatgtaagcttcagcgatgcagctcacgcaataacggactatatcgttggatattacagcgcactaagaccgcacgaatataatggtgggttaccaccaaacgaatcagaaaaccgatactggaaaaactctaacgcggaggccagttttagttgaccacaacagactacctgaagggagccgcggtcgcctggcagttgcagtagcaggagatcatccagccgcagtacaggtcacgatgactctggttaatgataccggctttgaccccgtattttccggctctatcgctgaatcatggcgtcagcagccgtgcacaccatcctattgttgtgactgggaggctgccaccatgcttcgcgctttccctctggcgaaaaagggagaaggacgggcccgtctgccttcactttatgccagcttcggtaagctgggtgagacaccgactcatgaagatatcattgataacaatcgatccatcaactggcctgtataacgtggctgccggtgattaagaaagctgcacctacctaagtagtagcaaacgcacactttttagaaaaatcgatggtcagaaactggattagcaattccgttccatggttgcttttgatttacgttggcgtctgatcattgatttatcctcaaaagcccaacctcattggtaatgaaccagctccgtgaatgtccgctctggcacagagcgaaattttttgatctcccccctgaaatctaaacttagtcatgtcacgtttttgggtttctaaaattttaacttcgcgtttttcgttgccgtaagggttatacagaaatgtccgttaagcagagttcaaaattgattgccgtgatcacgactggtttgaaagccgcgcccaagcctgtacagctctggtttgcgttgattatgaacctgtcagcctaaagcaagcggatggacgatgagtattggtaatctttcagagtccggaaaagttcagccccagtctgaacaggcttgctggcgccagtccagtttcattcagtcgtggtttggttcttacggcctgtgcaatctacctcattaggcacatcggcctgccagataccggctcggggtgtatttccgcttccacgctgaatactgttctcagcaatcctggggtcatcacctcttctggtgtgccttgcgccataacatgtccgtttgccattaccaccagttgatcgcagtaccggctagcctgattaaggtcgtgcagcacagcgaccaccgttttcccctgagtccggagttcgcccatcaaccgcatcaggtccacctggtgattgatatcaagataggtggttggctcatcaagtaatacaacgggcgtattctgggccaggaccattgccagaaatgcgcgctggcgctgaccgccggaaagctcggttaaccgacgaacggcaagatgattgatccgggtctggttcatggcgacattaactcgtgcattgtcttcagcggagagacgcccccagagtgacagccagggattacgaccatacgaaaccagctcctggactgtgatcccctctggcgttaaatggtgctgaggcagcagcgaaagcctgcgggccaactggcgcgatgagagcatatttatgggattatcgccgagaaatacggtgccagactgcggcattaaaagccgcgaaaaacagtttaacagcgtcgatttcccgcaaccgttaggaccgatcagggcggtgatcttccccgttggcagtgagagtgaaacgtcgttaagtaccttgtctgtcccgtaactgaccgtcagattttcagttcgtaaagtcatttatcgcattctcacaagcaaccagacaaaccacggcgcaccgataatggcggtcagcacgccaaccgggagctccagtgggggatgaataattctcgccagcagatcggcaaccaccaacagcaacgcacctgtcagggccgaaacaggcagcagtctgcggtgacgtccaccggtgatgctacgcatcatatgcggcaccacgagaccaataaagctaatcgggccgcaggcggccacgccggtagatgtcatggcgacagctagtaacaaagcccagaatcgggtatggggcaccgacacaccgagcgtggtggcgcgcgcatcgccgagtgcaaggaggtcgagatcgcggcaaaaactcaggctcagcggcagaaataaaatcatcagcgggatggcaatcttcacaaagctccagtcacggccccataagctgccggtcagccacagcagggcgttgttcacatcctgcgggcgcgagagcatcagataatccgtcaggctggcccagcatgcagaaagcgccacgccggtgagcgccagcttcatcggctggtgggtctttgccagcatcttcagcaatatcaaccccgccatgccgcccgcaaaggccagcagcggcagcaccatcacgggcagtgacggcataagaagtagagcccccacagaggccaggctggcggcatggttaacaccgagaatatccggtgatgccagagggttgcgcacaatcccctgtatcagcacgcccgccacggcgagggctgcaccgacaaacagtgccagcagcaagcgcggcagtcggtactccatcaatacataataatgctcgtgtccggcctgccagtcggtcagcagcgcgcgccacggcacggggatcactcccatatggagtgataacagcgcacagcccgccagggcaagggtgatgaaaataaccagcgcaattttcatcctcgcctcctcacaagccagacaaagcaagggctgccaatcagcgccagcactgcgcctgcgggcagatctccggggaaggccagcgcgcgtgcgagtacatctgccagcagcatcagcgtggcccccagcagcatgctcactggcagtacgttgcgctgatcgaagcctgcccagaagcgcgccagatgtggcaccagcagaccgataaacgccaccggacctgctacgctgacgcacgcaccaaccagaagcagcactaacatattgatgaccaaacgtagcctcgtcaggttcactcccagcgtatgggcggtgctgtcgctgaggttgagcaggttcagttgattcgccagcagcaacacgacagggactgcagtgaccaccaccggcaagagctgccagacatcctgccagcgggcgtgggacactccgcctgccagccagtaaaagatgccgtaagcatgatcttcggccagcagcagggtgatgcgggtaaggcccatacaaaaggccgacagcgcgatacccgcgaggatcagtttgtttctgtcatgggtatgacgaaatccgcctcctgcggtcatgaccagcagccagctcacgccgcccccgcatgccgcgatgaatgacagagaatagcctgcaatcggcgtcggactcagcgcgctggtaagcgccatagccagcgccgcgccgctgttaatgccgagcagtgaaggagaggccattgggttgtgggtcagggtttgcagcagcgtgcccgcgagcgccaggcttgcgccgatcagaacggcgaccaggcttcgtggcaaacgaaggttttgcaccagcgcttctggtagcgttggcgtgtgtccaggcagcagggcgcgggttgcatctgctccggaaacaggaatggccgagtagcaaaacagactcagccagaaaataataataagtgctgcaacgggaagcccccacagcagcaccgggtgttttatcgcggtcatttcacaacggtaagcggctgatggtggaagatttttaccgtgtcagcggcaatacgctctgcagcaaaaataccgcgcatccgcgcccaggtgttactgtcgaccgaagcaacctgctgcttctgcgcggcggttaacatctgccagagcggatcttgttgccagcgtttaacaatgctctcttcgcgatagtgggcaaccagcagccaggcaggattgaccgccagcagttgctccaggccgatggacggcatggacgcacccgccatcgcagcgggaacgttcagccccagagaggccagcacgctgccggtccaggtctcctgagtatgcaggttgaattgctgttcgcgtgatgtgccaaaggccacgcgtgtccctttgggaagctggctggcccactgcgccatcctctctttatgttgttccagacgtgcctgcatctctcgctttttacccaccatttcgccgatgatagccgcagattgcaaattttcagcgtaggtttcgttgcgggacttaagcagcagtaccggcgcgatttgctgcaaggcgatgtaaacccccgcatggcgactgctgtcggcaatgatcaggtctggtttcagagcggcaatggcttccaggctcggctgcgcgcgcgttccgacggactgccacggtttcaggtgcgcacgcacttcgggcaggatgcgttttgcatcgttatcgtcggcaataccgatcgggatgacgtccacggcggccagcgcatcggcgaacgagagttccagcaccacaatccgttgtggcgttttttcgagtgtaaacgtgccgtgttcgtcctgaaccgtggcggcaaaggcgtggctgatcaccagcagcaggcctgcaaaaagaaaacggataaatgccaacataatcacattccagctaaaagcccggcaagccgggcgttaacacatcagaacttcaacgacccctgcatatacagcgtgcgcggctggcctgcatagatgcctttgttgttgtcgtcataagagcggatgaagtagtcctggtcgaagatgtttttcacaccgaatgccaggttcagatctgccatctgcgggccaaagtcatacgccacgcgtgcgccccagagcatgaagccgggaatgcggccggtactgccgtcggcgctctctttcaccgtattggcgttatccgcaaactggctggactggaaatcgctgttcagattgaacgtccagtttcctggcttgtagtccacgcccagcgtgcctttatgtttcggggagaatggtaccagattgccgtaggtgtcgcctttctcgcggatttccgcgttcacatacgcatagctggcgtagatggaaacgttatcaagcgttggcgttagcgtacccagatcgtaacgtgcctgcgtttccagcccggtatggcgcgttttgccacgtgcagtgacggtgtcgttggtctggttggagtcgtactgattgttaaagttaatcaggaacagccccatttccgccgtcagcgcgccgtcgtcgtagcgggtaccgagttcccaggttcgcgctttttccggttcaacattgccgctttgcacagccttgccaatctggctgtactgtacggtgccgaacgagccttcagtgtttgcataaagattccagctgtcagtcaggtgatagagcacgttcaacgccggaagcggtgcgttatagctcacttcttcgtgcgtgcctgtgatggcgttgttctggtatgactcgatatgttcgaaacgcatacccggcgtgatggtccagttgccgatgtcgattttgtcatccagataccaggcgtgcgcctcggtgccggaacgcgtatcgcggtcgtaagggcttgagccggacggcaactgcccgctgctggtggcggtgtagtaacgcatttcatgcgttgattcattcaaatagcgatagcccacgcccacttcgtgcgcggaagggccgatcataaagatctggctgtagcgtggctcaataccgcgcacccagtagttacgcggcgagagggtgatgcgtttgccttgctccaggtagccgctgcgcagggtttgggtgtagaacccctgaatgttgaatttatgctggctgtctggctggaactggtagcccaggctcgccagcttgcgacgaccccagaagcggtcatacgggcgggtggattgccagcgatcggcgtcgtaatccgcgcgagacaggccaccgggcatgtcggcttcaccgtcgtaatattgcagcaggctgttgaaggtgtgcacctcatccggcgcatatttgcttttcagcatcaggtcgtcgatgcgggtggcgctgtgctcgcgccagtcactgccgcgcgtgccggagtagagcagcgcggtgccaaaaccgttgtccgctgtgccgcccaccatcaggttgtgcgtctctttcgggttgttttgtgaagaggttgggctgagctgaccttccacgcccgcctcgataccaaagtcctgcggaatggcacgggtaacaaagttcaccacgccgcccacgctctgcggtccgtaacgcaccgcaccaccaccgcgtaccacgtcaatggcatccatgttgccgagcgaaacgggagccagtgaaagctgcggctgaccgtaaggggcgaaggggacggggatgccgtccatcaggacggtcgagcggctggcgaggcgcgggttcaggccccggatgccaaagttcatcgccaggtcgtggctgccggtgccgttgttttccggcgcgctgacgccagggatgcggttaagtacctcacgcatggtggttgcgccggttttggcgaaatcctcacggcggatcacgtcacgcgcgccagcatgttcaaatacgtcgttttcacgcgcatcacccagccagtcgccgaccacggtcagggcatcttcttttggtgcgggcgcgggctccagcgtccagctgttatttcccagcggttttacctgcagtccgctgccgtccagcagttgttgcaggccgctctcgacgtcgtaatcgccgtgcaggccgttgctctgcttgccgcgcgtcaggctggcgtcaaccgagagggtaaatccgctgtgtgcggcatactgattgagcgctttatcgagcgatcccggtgcgatattaacctgtgcagcaaaagcggaaaacgagagaccggccagcggcagcaggctcaggcgaatggtgttaaccaaaggtgttgttttacgaaaaacgcgtaacggcgtcataccttccccatcatcatttttgttgtgttcagctatgagtcgaacgagaagggtaaaaaggacaatcgaaa

SEQ ID NO: 15 - protein, 774 aa, Escherichia coli
  complement of position 7849-10173 of seq id 14
MTPLRVFRKTTPLVNTIRLSLLPLAGLSFSAFAAQVNIAPGSLDKALNQYAAHSGFTLSVDASLTRGKQSNGLHGDYDVESGLQQLLDGSGLQVKPLGNNSWTLEPAPAPKEDALTVVGDWLGDARENDVFEHAGARDVIRREDFAKTGATTMREVLNRIPGVSAPENNGTGSHDLAMNFGIRGLNPRLASRSTVLMDGIPVPFAPYGQPQLSLAPVSLGNMDAIDVVRGGGAVRYGPQSVGGVVNFVTRAIPQDFGIEAGVEGQLSPTSSQNNPKETHNLMVGGTADNGFGTALLYSGTRGSDWREHSATRIDDLMLKSKYAPDEVHTFNSLLQYYDGEADMPGGLSRADYDADRWQSTRPYDRFWGRRKLASLGYQFQPDSQHKFNIQGFYTQTLRSGYLEQGKRITLSPRNYWVRGIEPRYSQIFMIGPSAHEVGVGYRYLNESTHEMRYYTATSSGQLPSGSSPYDRDTRSGTEAHAWYLDDKIDIGNWTITPGMRFEHIESYQNNAITGTHEEVSYNAPLPALNVLYHLTDSWNLYANTEGSFGTVQYSQIGKAVQSGNVEPEKARTWELGTRYDDGALTAEMGLFLINFNNQYDSNQTNDTVTARGKTRHTGLETQARYDLGTLTPTLDNVSIYASYAYVNAEIREKGDTYGNLVPFSPKHKGTLGVDYKPGNWTFNLNSDFQSSQFADNANTVKESADGSTGRIPGFMLWGARVAYDFGPQMADLNLAFGVKNIFDQDYFIRSYDDNNKGIYAGQPRTLYMQGSLKF

SEQ ID NO: 16 - DNA, 10183 bp, Escherichia coli
ttaactttatgacatcatactgcttttagaagtgaaaaattaaaagggagagactccgctctcccattattggctattttgcagggttactgcgtggtaccgtcggttttggtatcgacatcattattgatgccatcaccggtttgtacctttttattgatatccggacagcgaccatctttgcacatggtgttcttgtgctcttcatctttggtcattccgtcattgttcattgaagaaccatccgaatgcagcattgtgccgccagaaccggtatttaccccgttattgtcgacgttatttggcgcgacattttcacgggcgtcaggggctacctggcccgcatcagctgcggcgtttgcctggccgttattagtttgcgctccgctatcggcagccagtgcggcaccgctggcaaggcttagagtggcagtcagaaataatgtggccagttttgtcattttcataggatgctcctgttatggtcgttatgtcggataacctcttccaacagtgcatttgcaggtgaatataaggcattggtttaagatttcagccaggttatgaaacgcagcagagaatcttgaaataattaacaaacaaaggagttacagttagaaattgtaggagagatctcgtttttcgcgacaatctggcgtttttcttgctaattccaggattaatccgttcatagtgtaaaaccccgtttacacattctgacggaagatatagattggaagtattgcattcactaagataagtatggcaacactggaacagacatgaattatcagaacgacgatttacgcatcaaagaaatcaaagagttacttcctcctgtcgcattgctggaaaaattccccgctactgaaaatgccgcgaatacggttgcccatgcccgaaaagcgatccataagatcctgaaaggtaatgatgatcgcctgttggttgtgattggcccatgctcaattcatgatcctgtcgcggcaaaagagtatgccactcgcttgctggcgctgcgtgaagagctgaaagatgagctggaaatcgtaatgcgcgtctattttgaaaagccgcgtaccacggtgggctggaaagggctgattaacgatccgcatatggataatagcttccagatcaacgacggtctgcgtatagcccgtaaattgctgcttgatattaacgacagcggtctgccagcggcaggtgagtttctcgatatgatcaccccacaatatctcgctgacctgatgagctggggcgcaattggcgcacgtaccaccgaatcgcaggtgcaccgcgaactggcatcagggctttcttgtccggtcggcttcaaaaatggcaccgacggtacgattaaagtggctatcgatgccattaatgccgccggtgcgccgcactgcttcctgtccgtaacgaaatgggggcattcggcgattgtgaataccagcggtaacggcgattgccatatcattctgcgcggcggtaaagagcctaactacagcgcgaagcacgttgctgaagtgaaagaagggctgaacaaagcaggcctgccagcacaggtgatgatcgatttcagccatgctaactcgtccaaacaattcaaaaagcagatggatgtttgtgctgacgtttgccagcagattgccggtggcgaaaaggccattattggcgtgatggtggaaagccatctggtggaaggcaatcagagcctcgagagcggggagccgctggcctacggtaagagcatcaccgatgcctgcatcggctgggaagataccgatgctctgttacgtcaactggcgaatgcagtaaaagcgcgtcgcgggtaaggtttaattgtcggatgcgccgtcagagtggcgtatccgatgaatcaccacaggcctgataagtcgcgcagcgtcgcatcaggcaatgtgctccattgttagcaacaaaaaagccgactcacttgcagtcggctttctcattttaaacgaatgacgtttacttcgctttaccctggtttgcaaccgccgctgctttcgctgcgatctcgtcagcattacccagataatagcgtttcagcggtttgaaattctcgtcgaactcatacaccagcggcacgccagtcgggatattaagctcaagaatctcttcttcgctcatgttatcaagatatttcaccagcgcacgtaaagagttaccgtgtgcagcgatgatcacgcgctcaccgctcttcatacgcggcagaatagtttcattccagtaagggatcacgcggtcaatggtcagcgccaggctttccgtcagcggcagttctttctcgctcagtttcgcgtaacgcggatcgtgacccggataacgctcatcatctttagtcagttccggcggagtcactgcaaaaccacgacgccactgtttcacctgctcgtcgccatacttttcagcagtttccgctttgttcagaccctgcaacgcaccgtagtgacgttcgttcagtttccaggatttctcaacgggcagccatgcctgatccagttcgtccagcacattccacagggtatggatagcgcgtttcagcacagaagtgtaagcaaagtcaaagctgtaaccttcctctttcagcagcttacctgctgcttttgcttcgcttacgcctttctcagacagatccacgtcgtaccaaccggtgaaacggttttctttgttccactgactttcgccatgacgaaccagaaccagcttagttacagccatatacttactcctcaaatcatcttttaatgataataattctcattatattgccgcgacgaagcaacagcaatgcttacgcataaccatagcgaaaatagtggcgcagtgtaaggttgttgtgaatattgagttgcaaatatgtcggtgtttgctggtgatttgaacaatatgagataaagccctcatgacgagggcgtaacattactcagcaataaactgatattccgtcaggctggaatactcttcgccaggacgcaggaagcagtccggttgcggccattcagggtggttcgggctgtccggtagaaactcgctttccagagccagcccttgccagtcggcgtaaggttcggttccccgcgacggtgtgccgccgaggaagttgccggagtagaattgcagagccggagcggtggtgtagaccttcagctgcaatttttcatctgctgaccagacatgcgccgccactttcttgccatcgcctttggcctgtaacaagaatgcgtgatcgtaacctttcactttgcgctgatcgtcgtcggcaagaaactcactggcgatgattttggcgctgcggaaatcaaaagacgttccggcgacagatttcaggccgtcgtgcggaatgccgccttcatcaaccggcagatattcgtccgccagaatctgcaacttgtgattgcgcacgtcagactgctcgccgtcaagattgaaatagacgtgattagtcatattcaccgggcaaggtttatcaactgtggcgcgataagtaatggagatacggttatcgtcggtcagacgatattgcaccgtcgcgccgagattacccgggaagccctgatcaccatcatctgaactcagggcaaacagcacctgacgatcgttctggttcacaatctgccagcgacgtttgtcgaacccttccggcccgccgtgcagctggttaacgccctgacttggcgaaagcgtcacggtttcaccgtcaaaggtataacggctattggcgatacggttggcataacgaccaatagaggcccccagaaacgcggcctgatcctgatagcattccgggctggcacagccgagcagcgcctcgcggacgctgccatcggaaagcggaatacgggcggaaagtaaagtcgcaccccagtccatcagcgtgactaccatccctgcgttgttacgcaaagttaacagtcggtacggctgaccatcgggtgccagtgcgggagtttcgttcagcactgtcctgctccttgtgatggtttacaaacgtaaaaagtctctttaatacctgtttttgcttcatattgttcagcgacagcttgctgtacggcaggcaccagctcttccgggatcagcgcgacgatacagccgccaaatccgccgccggtcatgcgtacgccacctttgtcgccaatcacagctttgacgatttctaccagagtgtcaatttgcggcacggtgatttcgaaatcatcgcgcatagaggcatgagactccgccatcaactcgcccatacgtttcaggtcgccttgctccagcgcgctggcagcttcaacggtgcgggcgttttcagtcagtatatgacgcacgcgttttgccacgatcgggtccagttcatgcgcaacagcgttgaactcttcaatggtgacatcacgcagggctggctgctggaagaaacgcgcaccggtttcgcactgttcacgacgggtgttgtattcgctgccaaccagggtacgtttgaagttactgttgatgatgacgacagccacacctttgggcatggaaactgctttggtccccagtgagcggcaatcgatcagcaaggcatgatctttcttgccgagcgcggaaattagctgatccatgatcccgcagttacagcctacaaactggttttctgcttcctgaccgttaagcgcgatttgtgcgccgtccagcggcagatgataaagctgctgcaatacggttccgaccgcgacttccagtgaagcggaagaacttaacccggcaccctgcggcacattgccgctgatcaccatgtccacgccgccgaagctgttgttacgcagttgcagatgtttcaccacgccacgaacgtagttagcccattgatagttttcatgtgcgacaatgggcgcatcgagggaaaactcgtcgagctgattttcataatcggctgccatcacgcgaactttacggtcatcgcgtggtgcacaactgatcacggtttgataatcaatcgcgcagggcagaacgaaaccgtcgttgtagtcggtgtgttcaccaatcaaattcacgcggccaggcgcctgaatggtgtgagtggcagggtagccaaatgcgttggcaaacagagattgtgttttttctttcagactcatttcttacactccggattcgcgaaaatggatatcgctgactgcgcgcaaacgctctgctgcctgttctgcggtcaggtctcgctgggtctctgccagcatttcataaccaaccataaatttacgtacggtggcggagcgcagcagaggcggataaaagtgcgcgtgcagctgccagtgttgattctcttcgccattaaatggcgcgccgtgccagcccatagagtaggggaaggagcactggaagaggttgtcataacgactggtcagctttttcaacgccagcgccagatcgctgcgctgggcgtcggtcaaatcggtgatccgtaaaacgtgggctttgggcagcagtagcgtttcgaacggccaggcagcccagtaaggcacgacggctaaccagtgttcggtttcgacaacggtacggctaccgtctgccagctcgcgctgaacataatccaccagcattggtgatttctgttcggcaaaatattctttttgcaggcggtcttcgcgctcagcttcgttaggcaggaagctatttgcccaaatctgaccgtgcggatgcgggttagagcagcccatcgccgcgcctttgttttcaaaaacctgcacccatgggtacgttttccccagttctgcggtttgctcctgccaggttttgacgatttccgtcaatgctgcaacgctgagctctggcagcgttttactgtgatccggtgaaaagcagatcacccggctggtgccgcgcgcgctctggcaacgcatcagcggatcgtgactttctggcgcatctggcgtgtcagacatcaaagccgcaaagtcattagtgaaaacgtaagtcccggtgtaatcggggtttttatcgcctgtcacccgcacattacctgcgcagaggaagcaatctggatcgtgcgcaggtaacacctgtttggctggcgtttcctgcgccccctgccaggggcgcttagcgcggtgcggtgaaaccagaatccattgcccggtgagcgggttgtagcggcgatgtggatgatcaacgggattaaattgcgtcatggtcgttccttaatcgggatatccctgtggatggcgtgactgccagtgccaggtgtcctgcgccatttcatcgagtgtgcgcgttacgcgccagttcagttcacggtcggctttgctggcgtccgcccagtaggccggaaggtcgccctcgcgacgcggtgcaaaatgataattaaccggtttgccgcaggctttgctgaaggcattaaccacgtccagcacgctgttgcctacgccagcgccgaggttgtagatgtgtacgcctggcttgttcgccagtttttccatcgccacgacgtgaccgtccgccagatccattacgtggatgtaatcgcgtacgccagtaccatcttcggtcggataatcgttaccaaaaatcgccagcgagtcgcgacggcctacagcaacctgggcgatgtatggcatcaggttattcggaatgccttgcggatcttcgcccatatcgcccgacggatgcgcgccaaccgggttgaagtagcgcagcagggcaatgctccagtccggctgggctttttgcagatcggtgaggatctgttccaccatcagcttgcttttgccgtaagggctttgcggtgtgccggtcgggaagctttcaacgtatggaattttgggctgatcgccataaacggtggcggaggagctaaaaataaagtttttgacgttagcggcgcgcatggcgctaatcaggcgcagagtgccgttgacattgttgtcgtaatattccagcggtttttgtaccgattcgcccacggctttcagcccggcgaagtggatcacggtgtcgatagcgtgatcgtgcaggatctcggtcatcaacgcttcgttacgaatatcgccttcaacaaacgttggatgtttgccgcctaaacgctcgataacaggcagtacgctgcgcttactgttacagaggttatcaagaatgatgacatcatgaccgttttgcagtaattgcacacaggtatgacttccaatgtaaccgctaccaccggtaaccagaactctcataattcgctccattaggcttatggtatgaaataaccatagcataacaaagatgcgaaaagtgtgacatggaataaattagtggaatcgtttacacaagaatttagccgttttttatgcgcgattaagtgattataaaacagagggtttatgaatgattgcgctttttatctgaaaaaagacgcggtttcatgcctgcatgcgtcgaaccgttggccggagagggtgctaaggccgcctccggcaaggtcagcactaccgactcaatatatttttgtcagcacatagcgatagagtccaccgtccggcacgaactcaagacgatgggtaatacaggcaggcgcatcttcagcgtggtgcgaaacaaacaacaattgcgtttcaccttcgctaatcagcacatcaacaaaacggcggataagctggcgattcagcggatcaagcccctgtagtggttcatcgagaataagcaacgtcggatgtttcaccagtgcgcggacaatcagcgccagacgctgctgtccccaggaaagactatggaacggagcgtcagccgtgcgtttatcaatgccgagaatatccagccactgctgcaccagtttttgctggcgatccgaaacggcctgataaatgccaatcgaatcaaaatagccagaaagaatcacattacgcacggtagtgctgacccggtaatccagatgcaaactactgctgacgtaaccgatatgctttttgatatcccagatggtttcgccgctgccgcgacgtcgtccgaaaagcgtcaaatcgttgctgtaaccttgcggatgatcgccagtaaccaggcttaataacgtcgattttcctgcaccatttggcccgacaatttgccagtgttcgcctggattcacctgccagctaaggttattaagaatggggcgatcgttataagaaaccacgccattgttcagcacaatgcgcggttcgttggcgggtaaggcgtgacgtgctgaaggttcatccggctccggcagttgcacaccttcaagctgttcactatgcgccagttgcgcgacgagtgcttgttggagcagttcctctttagcgccagtttccgctaacgtgcaatccgccagcacgccagcaaactggacaaactccgggatctcatcgaagcgattgagcaccagtaccagagtaataccggactgatgtaacgaggcgagtcgctcagccagctgctgacgtgaggcaacatccaggccatcgaacggctcatcaagaatcaacaagtcaggctccgacatcagcgcctgacacagcagggtttttcgcgtctcgccagtggaaaggtatttaaagcgtcggtcgaggagggcggtaataccgaactgctgcgccagttgcatgcaacgcggtgcatcctttacttcatcctgaatgatctcagccgtagtgcgtccggtgtcatcttcgccagggccgagcatatcggtgttattccgctgccattcgtcgctgacgagtttttgcaattgctcgaaggagagacgagtgatgtgggaaaactggctttgccgttcacctttcaaaagcggaagttcccccgccagcgcgcgggccagggccgatttcccgcttccattcgaaccgacaaacgcccaactatcacccgcgtttaacgttagctgaggcaattgcagcgtttttgtgtcgctaagacgaaacgtgccttgcaaaatttgcaacgatgacattttatatcccactttgtgcagcgattactgacagggatacgtgtttcataacaaattgtcaacacgcttagcacagcgtggcgataatcacgctgtcggcattaaagtaggccgtgacattctgtccttgctgaagagaagtcgcttcatttaccggcactgtggcgcacagtgtttgcccgtcgggtagcgccattaatacttcgcactgctctgcgccgcgctcaatatgactaataatacccggtaattggttgtcagcgttttgcgcgaccgcctcgtcctgagtaatacctacccacggcgcttttagcaatatcaacacttctttgccttcatccagccccagacgcgcgccgctttgtgcggtaattgcgactttcaggcgtgtttttccgtcagccagtaagacatcaacatgctgttgaacgtcatcatgatcgcgggcggtgatggtaccgaaccactggttacgggcgctggtttgcagtgaaaaacgtgagatcgcggccagcaggctgttcagcggcagggcgtcatcgtcacttaacacatcaaaggctttttgctggatttgcgccagtaagtcatagagctgaatcagtcgctgaccatagcgggtcagtactgcgccgccgccacctttaccgcctgttgcgcgctcgaccagaatatgctcacttaactgattcatctcgttaatggcatcccaggcgcttttatagctaataccggcatctttcgctccctggctaatggaaccggaaagcgcaatgtgttttagtagcgaaatgcggcgcgggtcggcgaataatttttgttggagcttaagggtgagaaggatttcggcctgcataacaatgtcctggcaaaagtcttattgtgacggaaaacgaacgccacgcaaagctgaccgcacaaaaggggagtgcttttctgtgcttagcggttagaatagtctcatgactatatctggagttgaccatgttagagttattaaaaagtctggtattcgccgtaatcatggtacctgtcgtgatggccatcatcctgggtctgatttacggtcttggtgaagtattcaacatcttttctggtgttggtaaaaaagaccagcccggacaaaatcattgattccctgaatgcccgcttagtcgggcattttctttttctcaacttcctgcttttcctgccgatattttttcttatctacctcacaaaggttagcaataactgctgggaaaa

SEQ ID NO: 17 - protein, 382 aa, Escherichia coli
  complement of position 3981-5129 of seq id 16
MSLKEKTQSLFANAFGYPATHTIQAPGRVNLIGEHTDYNDGFVLPCAIDYQTVISCAPRDDRKVRVMAADYENQLDEFSLDAPIVAHENYQWANYVRGVVKHLQLRNNSFGGVDMVISGNVPQGAGLSSSASLEVAVGTVLQQLYHLPLDGAQIALNGQEAENQFVGCNCGIMDQLISALGKKDHALLIDCRSLGTKAVSMPKGVAVVIINSNFKRTLVGSEYNTRREQCETGARFFQQPALRDVTIEEFNAVAHELDPIVAKRVRHILTENARTVEAASALEQGDLKRMGELMAESHASMRDDFEITVPQIDTLVEIVKAVIGDKGGVRMTGGGFGGCIVALIPEELVPAVQQAVAEQYEAKTGIKETFYVCKPSQGAGQC

SEQ ID NO: 18 - protein, 348 aa, Escherichia coli
  complement of position 5133-6179 of seq id 16
MTQFNPVDHPHRRYNPLTGQWILVSPHRAKRPWQGAQETPAKQVLPAHDPDCFLCAGNVRVTGDKNPDYTGTYVFTNDFAALMSDTPDAPESHDPLMRCQSARGTSRVICFSPDHSKTLPELSVAALTEIVKTWQEQTAELGKTYPWVQVFENKGAAMGCSNPHPHGQIWANSFLPNEAEREDRLQKEYFAEQKSPMLVDYVQRELADGSRTVVETEHWLAVVPYWAAWPFETLLLPKAHVLRITDLTDAQRSDLALALKKLTSRYDNLFQCSFPYSMGWHGAPFNGEENQHWQLHAHFYPPLLRSATVRKFMVGYEMLAETQRDLTAEQAAERLRAVSDIHFRESGV

SEQ ID NO: 19 - DNA, 12343 bp, Escherichia coli
tccggcaacattatcccacgcatggtcagcaaactgacattatctctccgccctggcaggcatcagaaaatcgctcatactttaatcggtaaacagcacctttagatgctgttttcgatacacaatttcaatcaaggagtcattatggctggttggtttgaactcagtaagagcagtgataatcagttccggtttgtgctaaaagcgggcaatggtgagactatcctcaccagcgagctttatacctcaaaaacctctgcggaaaagggcatcgcgtcggtgcgtagcaacagcccgcaagaagaacgctatgagaaaaaaacggcaagtaacggcaaattctatttcaatctgaaagccgctaatcatcaaattatcggctccagccagatgtacgccaccgcgcaatctcgtgaaaccggaattgcctccgttaaagccaatggcacaagccagacggtgaaagacaatacgtaattacgatgccgggcgtgggttgttggcgtccggcgctttaccagagccccccacagcgctacaatgcccgcccttaaagtgggggcactcccctaaccgcttcatcaggtgaagcggatctgacctgtcatcagaacgagagaattatgtttaaaccggaactcctttccccggcgggaacgctgaaaaatatgcgttacgctttcgcttatggcgcagatgctgtttatgcgggccagccgcgttattccctgcgtgtgcgcaacaacgaattcaaccacgaaaatcttcagctcggcatcaatgaagcccacgcgctggggaaaaagttttatgtcgtggtcaacattgcaccgcacaacgccaagctgaaaacctttatccgtgacctgaaaccggtggtggaaatggggccggatgcgctgattatgtccgatccagggctgattatgctggtgcgtgagcacttccctgaaatgccgatccacctttcggtgcaggctaacgccgtgaactgggcgacggtgaaattctggcagcaaatgggcctgacccgcgtgatcctctctcgcgagctgtcgctggaagagattgaagagatccgcaatcaggtgccggatatggagatcgagatcttcgttcacggcgcgctgtgcatggcctactccggtcgctgcctgctctctggctatatcaacaagcgcgacccgaaccagggcacctgcaccaacgcctgccgctgggagtacaacgtccaggaagggaaagaagatgatgttggcaacatcgtacacaagtacgagccgattccggtgcaaaatgttgagccgacgctgggtatcggcgcaccaaccgacaaagtgtttatgatcgaagaggcccagcgtccgggcgagtatatgaccgcgtttgaagatgagcacggcacttacatcatgaactcgaaagatctgcgcgccatcgcccatgtagaacgcctgaccaaaatgggcgtgcattcgctgaaaatcgaaggtcgtaccaaatctttctactattgtgcacgcaccgcacaggtttaccgcaaagctatcgatgacgccgctgcgggaaaaccgttcgataccagcctgctggaaactctggaaggtctggcgcatcgtggctataccgaaggtttcctgcgtcgtcatactcacgacgattatcagaactacgaatacggttattcagtttctgaccgccagcagtttgttggtgagtttaccggtgagcgcaagggggacctcgcggcggtagcggtgaaaaataaattctccgttggcgacagccttgagctgatgacgccgcaaggcaacattaattttacccttgagcacatggaaaacgccaaaggcgaagctatgccgatagcaccaggcgatggttatactgtgtggctcccggtcccgcaggatcttgagctcaattacgcgctgctgatgcgtaatttctccggggaaaccacgcgtaatccccacggtaagtgattaatttcgattatttttcccggatggaaaattcttagaaaccgatcacatacagctgcatttattaaggttatcatccgtttcgctgaaaaacataacccataaaatgctagctgtaccaggaaccacctccttagcctgtgtaatctcccttacacgggcttattttttacgcgtaatacaatgaaataaaaggatttatttctggtcacgtccacacattgaccacatcgacaaaaaagcccctcgactgaggggcttcctgtttctaattacatccacataatttgctgccctgacggcaacgggtgcggccttacgacgtggacttctcccggcttcacaatgtatcgctgtaccgactcataagtgatgaacgtggcgctgcaattcacgttctgacactggtgataacgctcttttgtcgtgtcagtgatatagcggcttgtacgcgcatgtgcggcatgctggcataaaggacaatgaaacatcgcgagcacctcttccggttttgttgatggtgccattttagttaatttacccttacaaaacaaacagataaaataaaaacatcactcattatcttctgtttcgtaccccacatcagaaagcctgacctcaagctctaatgacgtcgtgaagccgctattattcagaaaatgtgtcaccttagtgattgtccagtcctgctcgtctatgacgcgcttaaagccagacactttgaccggtgtttccgtgtaaatatctgcccgaccggtagccaggctgatggagaactctgctacacgggcttatttttttatgcataagccctatctctggtaaccgtcttccattgaccacatcgatagaatcctccttcatagcacgatgcctttcacttatcggcatcgtgctcccacaggttccggctacgcacagccagaacgcgcatatttgacgcttaccaaaaaatattctcactctccacatttgaatgtcagacgagcgacaccatgtaatcctacaccttctgtcttcagctcaactatttgcatttttttgccctgagtaacacagaaatgagttgcatcattttttactatattttctgcaccagatattctacccctggctaaagaagcttcggcttcggtgtagtattggttatcgagtttacgctgaatattacttttatatgcaagaccaaatttaccgatacttgtctcatcattatgcacagcacaaccagacataataaaaatactaattaatgatatagcagctatctttttcatctcaccttcccccattaaataccaacgacactctctagtgtttaaatataataatggcatgattattataattgaataggattataataaatgttctgtacaacatttcctacataagtaggaattacggacattgaggcccttcagggtaactccatgggggctttaatatattatattgaagatgccactgtttagttgaatattaggtatatgctcttttttgaaatttatcggtggcagccgttagtattcgctgtccccattgcaagctcctggtggtaaccactgaatcctccatacttgaactgactttttatcctccgactttcatcctgttctgactccaccttttgttttctgctctacactatctacagaccaatcataaaggcacatacgatcatggcagaatttcccgccagcttactgattcttaatggcaaaagtactgacaatctacccttgcgcgaagcaattatgctgttgcgtgaggaaggaatgacgatccatgtgcgggtcacctgggagaaaggcgatgccgcacgatatgtagaggaggcccggaagtttggcgtcgcaacggtgattgccggtggtggcgatggcaccattaatgaagtttctacggcgttgattcagtgtgagggggatgacatacccgcgctgggaattttgccattaggaaccgccaatgattttgccaccagtgtagggattcctgaggcactggataaggcgctgaaactggcaattgccggtgacgccattgcgatagatatggcgcaggtcaacaaacaaacctgttttattaatatggcgacaggcggatttgggacgcgtattaccacagaaacgccggaaaaattaaaagccgcgctgggtagcgtctcttacatcattcatggcttaatgcgtatggatactctgcaaccggaccgttgtgaaatccgcggtgaaaactttcactggcaaggtgacgccctggtcattggtattggtaacgggcgtcaggccggtggcggtcagcaattgtgtccgaacgcgttaattaacgatggcttgctgcaactgcgcatttttaccggcgatgaaatacttccggctctcgtatcaaccttaaaatctgacgaagataacccgaatattatcgaaggcgcttcgtcgtggtttgatattcaggcaccacacgacatcacctttaatcttgatggcgaaccgttgagtgggcaaaattttcatattgaaatacttccggcagcgttgcgttgtcgattaccaccagattgtccactgttgcgttaatcaaactattctctcttgaaccagggagaatccgtaatgccggatgcggtgtaaacaccttatccggcatacagaacaatactacaccgtaattaattttacccgcgtcttctgcaatgccagtttatccacctctgacacagcatcatcggtaataataatgtcaattttttcgattggtagtacctgattaaaaccgcgacggttaaatttcgatgaatcgagaacggcaatcactttattagcggctgtgaccatcgcaccgctaatagaataaccttcattaaaggtcgtaataccattaaccgcatcaataccatcagcaccgacaaacattaaatcggcattaatatcctgtaatgaacgctcggcaatggaaccatgcatcgagcgcgttttatggcggaccgtgccaccacagacgaccagagtaatgtctttattttcggaaagggcaaacgctgccgggagactgttggtaatcaccgtgatatttttggcggtcattaatccttcggcgataagcattgtcgtacttccgctgtcgagaataacggtctgatcttacccagcaatagtggacacgcggctaagtgagtaaactctcagtcagaggtgactcacatgacaaaaacagtatcaaccagtaaaaaaccccgtaaacagcattcgcctgaatttcgcagtgaagccctgaagcttgctgaacgcatcggtgttactgccgcagcccgtgaactcagcctgtatgaatcacaactctacaactggcgcagtaaacagcaaaatcagcagacgtcttctgaacgtgaactggagatgtctaccgagattgcacgtctcaaacgccagctggcagaacgggatgaagagctggctatcctccaaaaggccgcgacatacttcgcgaagcgcctgaaatgaagtatgtctttattgaaaaacatcaggctgagttcagcatcaaagcaatgtgccgcgtgctccgggtggcccgcagcggctggtatacgtggtgtcagcggcggacaaggataagcacgcgtcagcagttccgccaacactgcgacagcgttgtcctcgcggcttttacccggtcaaaacagcgttacggtgccccacgcctgacggatgaactgcgtgctcagggttacccctttaacgtaaaaaccgtggcggcaagcctgcgccgtcagggactgagggcaaaggcctcccggaagttcagcccggtcagctaccgcgcacacggcctgcctgtgtcagaaaatctgttggagcaggatttttacgccagtggcccgaaccagaagtgggcaggagacatcacgtacttacgtacagatgaaggctggctgtatctggcagtggtcattgacctgtggtcacgtgccgttattggctggtcaatgtcgccacgcatgacggcgcaactggcctgcgatgccctgcagatggcgctgtggcggcgtaagaggccccggaacgttatcgttcacacggaccgtggaggccagtactgttcagcagattatcaggcgcaactgaagcggcataatctgcgtggaagtatgagcgcaaaaggttgctgctacgataatgcctgcgtggaaagcttctttcattcgctgaaagtggaatgtatccatggagaacactttatcagccgggaaataatgcgggcaacggtgtttaattatatcgaatgtgattacaatcggtggcggcggcacagttggtgtggcggcctcagtccggaacaatttgaaaacaagaacctcgcttaggcctgtgtccatattacgtgggtaggatcagtcatcccttcgtggatcattttgactgccgcctgcgctattctgttttttggcgcgctggcgagctgaaatcgctctttaaacccgacttcctgggtctcggtttcactattaccagacattattttcgccgcaccgccatgaaagcgcgtaaccacgcctttttgttcgagaaagcgcaaatcggcacggattgtcgcttccgaggcagcaaatactcccgccagatcctgaacaagcacggttccctgttcattcactaattggatgatcttattccttcgctcgaatgaattcatcgtcatttacccatattcaattgtggctagtgtaaacgaagggggaccattggtgaatgatctgttttgcacaataccgggccagcatcacgctggcccgcggtttcagggaatgagcaacactttgcccggcatagcattacgagcgatgtcacgcaccgcctgggcgaagctttcaaagcttccacggtgagcgattaatggctccaggcttaacttacgttctgtcagcaaccggctcgccgtttcccactcctgccccggccaagggctggagtagttcatccaactgccgataaccgtcagctctttacgcaatattttgccaaacgttgccgatgttaaatgcagatcctgatgcaacgtgcccaccagcgccagttgggcatgaggaccggcaatctctaccgccagttcgacagtttgcggtacgccagccgtctcgaggataagctgattaaagcgcagttcgcgtaaaacgctctgcatttgcggcgcgctcatttcgctactgttaaatgtttgcatcgcaccgaaagattttgccagtgccagtttttctgaactaatgtcgatcgccgtcacactctttgctcccagcgcgacagcgcactgaatggccagcaggccaatggttccggcaccaataataataacgtttttattctcacaaccttgcgctaaatgaaaagcatgcagaccaacggtaatcggctcaataaaagccccatcctcaataggcatatccgtgggtagagcaaagacattttttcgcttaacgacaatatattcagcaaatccaccatcacgccgcgagccaataaaatcatattttgcgcactgggaataaaaccctttcagacactctggacaagtaaaacagggtaataacggcacacaggcaaccgcatcgccagggtgtaaatcatcaacaccggatcccaccgcatcaatatagccgctaaattcatggcctaacgttattggataataatgtgcaccatttttaaatatcctgggtaaatcggaaccacataagcccgagctggcaatttttacccgcacctcatcctgatgtttaatttcaggaatgacgctttctgcaacgcgcacgataccatcagtatcattcaccactgatttcataaaaactcctgattgttaagggggataacctccccctcaggtaaaaattattctgcgagaacgactttctcttgtttaataaagccacgcgctctacgccaggtcatgaaaataccggtcagataaattgcaccgataataatgaaaccgggaatattttgcggggagaaaacctgaatcagtaaccaggtaatgggagaaccgccctgatccattgaagccaccatacccccggcttttaacgccccagcattagccgccagttgggtgtgcaaaccaatagtttgcgtcgcgatccacagggtgatgctcataatgatgacacccgagattaaggtgcggaacagatttccacgatgcacggcgaccgccatcgccacgaagaagccgatggtggcaagatcgccaaacggcagcacctgattacccggcacacaaacagcaattaaaatggtgagtgggataaaaatcaggcttgccgataccaccgccgtatgtcccagcagcaacgccggatcaaggccaatcaggaactcctgaccgccgaacttcgcctgtaaacgactacgagcctgcttagcgatgggcgttaaaccatccatgatgggtttaatcacccgtggcattagcagcatcactgccgccgtttttaccgccagctgcaatacacctttgacatcgtaacccgcgaggatgccgataatcagccccatcacaaaacccacggtgacaggctcgccaaatggaccaaatttgcgctgaatatcgtcggcgctaaatttaattcggttaacgcctgggattttctcgatgatagcatcgaccagcaccgcaatcggccccatatacgccgacgtaccgtgcggaatagcaataccttccagctcaaagaaatttcgggtatcgcgggcaaaccagtcgccgagcttataaacaaacgccgcgtgaattaccacacctgccatccctatcatccatgaaccggttgccagatgcagcaacgcgccggtgaaggtcatatgccagatattccagatatcaacatttaccacccgcgtcatacgggtcagtaacatcgccacgttaaccagaatcgcaatcggaatcgccaccagcgcaatttgcgacgcccaggtcattggtgaagagcccggccagccaacatcgaccacatgcagattcaggtcgaaattttccgccatcgctttcgccgccgggccaatggaatccagcattaagccaatcacaaggccaatgccaacaaagccaatcccgatatgcagacccgctttaaagcaatcgcctgccttcatgcctaatattttagaaaaaataatgatgacaatcggcagcatcaccgtagggccgaggtcgagaatataacgcatgacttctgaaaacataggtcacccctgtaagatagtcagaattttattttgtaatgcttcgataccgataccagaaataaaaggcatgccgtgaactaacggaatatcgccaaaactacgatccactttggcagtggtgcatatcaaatgcacaccatccatataggtttctatttcattaacccgacactggattaattcaacaggaatattatgattctgacacaactctttaatttcttccgccgccatcgtagaggtcgcaaccgcgcctccgcaagcgacaataatcttgcgtttcataaatagtcctttttattgttacagagggatttattcgtctgaatctaaaacatactttgtgaagtattcctttaactgggtttcaggaagagtgattagtgtctcgacgatatcgggctgttgtaacttgccaaataaacagcgtaaaagtttcaattgctgctgcggattttccacaatcaacgcaataaccaacgataccgccacgtcgttatcatcatccgcttgctgaaaatgaactttatttgttggccttaacagataaatggctgacgacttagcatgaatcgcctcacaatgcggtattgcaatagcgtgctgctcaagcattatcccggtagggaattctgcttctctggcaattaatgcctgtggccaggtatcatgaaccacacctttggcgagcatctcattaccgatatgggttaaaacttcgctacgatcgacaaaagaaattccgctacgaacaaacaggttagtcatataccgtccttattccgcacagccgtagcgataggcgcgcaaaacatcataaattttatccataatcagctgatgcggtattgctgataattccccggactgaatgcgttcaaattgtttgggaagatactgactaatcatgcccagtgggatgtccacgccttcaagattcaccatcatcgtttcgacgctatttttaatccgactatgcggccagtaataacgaatacgatccgacaggctgtaacgaatatccagtaatgaatcgttaaaacccgtacgataatattttttccagtattgcggttcgtcgagcatcacttcttcaattaccgccaggcaaccgctgcgattttcaggggcgataagttcctgctcaatttgtgccagtgcaaatatcgcctcgcgtaaagcaaaggttaatgcgggaccgactttcaatattgcaaagtgatcgcggactaattcccaataagccgtccgggtctggtaatcggtagaatgtgcttcataaaccattcgggtgttttctatccattgcgccagcggctgcgcttcctgcggctgataatggataatattgctgtgatcaaattccacacccggctgcaccacgatggcaatcacacgtgttaacgcctctgtcagcccacgggcaataaaggccttttgatgcgtacgtaaagtattggcggcatcttcaacatgggtgatgtgtactgactgaatggcgctggcctcaccgcccggaaccggaacttcggtgccaatgacatagctcagttgctcacgctggcaatctgtcgccacactttccgcagcaaagcaaagcacagcagctcgttccgcaaccgtttctggtgctaacggtatgggatcccccgcgcaggacattgacgcatcaagatgaattttactgaagccggcacgaacatattcctttaccagctcgacggatttttccatcgccgcatccgcattttcttgctgccagcagtttggccccagatgatcgccgccgagaataatgcgttcgcgtgcaaacccaactttatcggcaatcgtaaaaacaaattcgcgaaagtctgccggtgtcattccggtataaccgccaaattgattgacctggtttgacgttgcttcaatcagcactttgcgcgtgctgttgcgatcaaatgccagcgccgcttcgataaccaacggatgggcagaacagactgaacatatgccgatatgttcaccagctttatgccgggcaattaacgttttcatgttttttccttgttaaatggcaggtgcgttatgccctgccctcgcagccacaatcggcaatcactttgctcaccacatcgcgcattgcggatttagccgactgcaaataatcccggggatcggtcgcttcagggtgctcggtcaggtaattttttaacgcctgcgagaaggcatttttcagctccgttgcaacgttgattttgcatatccccagtttgatggtttgctgaatatccttagtcgataaccctgacgcgccatgcagcaccagcggtaagttcacccactggcgaatgttctccagtctagaaaaatcaagcgccggtgcgctggcatacatcccatgagccgtgccgatggcgaccgccagggaatcaattccggttgcctcggcaaattcacgcgcctgagcggggttggtgtacaacgcatcggcttcattgacttgcacatcatcttcctggccgccaagttgccccagctccgcctcgacgctgacatcaaagcgatggcaaaaatccaccacctctttgacccgtgaaatattttgcgcaaaaggcaaatgcgaggcgtcaatcatgactgagcgcacgccagaacgaaccttctgagcgatatcgtcaaatttcgtgtgatggtcgagatgaattgccagtggatggtgatattgcttcgccatcgcgctgaccagcgccaacagattttctgtaccagcatgagtaaatgtgccaggcgttccggcgatgatgaccggcgcatgcaggttggcagcggtttctaccaccacttgcatcgtttcgagattgtgaatattgaatgccggaaccgcataaccgccgcgctgtgcgttgttcagcatctgctttgtcgataccacgtacattttcatatcctgtcgtttgttttcgatttcaaaatataatgaaattatttgtttttaaatatcgagataacgatcacaaaaacgacaatatgaaaattattcgaggagtgaaaggcaaaaaaacggcctcccgatagggaagccgtagcaaagtgcgcgtgtttttatgccggatgcggtgtaaa

SEQ ID NO: 20 - protein, 150 aa, Escherichia coli
  complement of position 9551-10003 of seq id 19
MTNLFVRSGISFVDRSEVLTHIGNEMLAKGVVHDTWPQALIAREAEFPTGIMLEQHAIAIPHCEAIHAKSSAIYLLRPTNKVHFQQADDDNDVAVSLVIALIVENPQQQLKLLRCLFGKLQQPDIVETLITLPETQLKEYFTKYVLDSDE

SEQ ID NO: 21 - protein, 451 aa, Escherichia coli
  complement of position 7877-9232 of seq id 19
MFSEVMRYILDLGPTVMLPIVIIIFSKILGMKAGDCFKAGLHIGIGFVGIGLVIGLMLDSIGPAAKAMAENFDLNLHVVDVGWPGSSPMTWASQIALVAIPIAILVNVAMLLTRMTRVVNVDIWNIWHMTFTGALLHLATGSWMIGMAGVVIHAAFVYKLGDWFARDTRNFFELEGIAIPHGTSAYMGPIAVLVDAIIEKIPGVNRIKFSADDIQRKFGPFGEPVTVGFVMGLIIGILAGYDVKGVLQLAVKTAAVMLLMPRVIKPIMDGLTPIAKQARSRLQAKFGGQEFLIGLDPALLLGHTAVVSASLIFIPLTILIAVCVPGNQVLPFGDLATIGFFVAMAVAVHRGNLFRTLISGVIIMSITLWIATQTIGLHTQLAANAGALKAGGMVASMDQGGSPITWLLIQVFSPQNIPGFIIIGAIYLTGIFMTWRRARGFIKQEKVVLAE

SEQ ID NO: 22 - DNA, 10776 bp, Escherichia coli
  CDS (9140)..(10645)
gaacataagggaaaccagtattcacgctggatcagcgtcgttttaggtgagttgttaataaagatttggaattgtgacacagtgcaaattcagacacataaaaaaacgtcatcgcttgcattagaaaggtttctggccgaccttataaccattaattacgaagcgcaaaaaaaataatatttcctcattttccacagtgaagtgattaactatgctgattccgtcaaaactaagtcgtccggttcgactcgaccataccgtggttcgtgagcgcctgctggctaaactttccggcgcgaacaacttccggctggcgctgatcacgagtcctgcgggctacggaaagaccaccctcatttcccagtgggcggcaggcaaaaacgatatcggctggtactcgctggatgaaggtgataaccagcaagagcgtttcgccagctatctcattgccgccgtgcagcaggcaaccaacggtcactgtgcgatatgtgagacgatggcgcaaaaacggcaatatgccagcctgacgtcactcttcgcccagcttttcattgagctggcggaatggcatagcccactttatctggtcatcgatgactatcatctgatcactaatccagtgatccacgagtcaatgcgcttctttattcgccatcaaccagaaaatctcaccctggtggtgttgtcacgcaaccttccgcaactgggcattgccaatctgcgtgttcgtgatcaactgctggaaattggcagtcagcaactggcatttacccatcaggaagcgaagcagttttttgattgccgtctgtcatcgccgattgaagccgcagaaagcagtcggatttgcgatgacgtttccggttgggcgacggcactacagctaatcgccctctccgcccggcagaatacccactcagcccataagtcggcacgccgcctggcgggaatcaatgccagccatctttcggattatctggtcgatgaggttttggataacgtcgatctcgcaacgcgccattttctgttgaaaagcgccattttgcgctcaatgaacgatgccctcatcacccgtgtgaccggcgaagaaaacgggcaaatgcgcctcgaagagattgagcgtcaggggctgtttttacagcggatggatgataccggcgagtggttctgctatcacccgctgtttggtaacttcctgcgccagcgctgccagtgggaactggcggcggagctgccggaaatccaccgtgccgccgcagaaagctggatggcccagggatttcccagcgaagcaattcatcatgcgctggcggcaggcgatgcgctgatgctgcgcgatattctgcttaatcacgcctggagtctgttcaaccatagcgaactgtcgctgctggaagagtcgcttaaggccctgccgtgggacagcttgctggaaaatccgcagttggtgttattgcaggcgtggctgatgcaaagccaacatcgctacggcgaagttaacaccctgctagcccgtgctgaacatgaaatcaaggacatcagagaagacaccatgcacgcagaatttaacgctctgcgcgcccaggtggcgattaacgatggtaatccggatgaagcggaacggctggcaaaactggcactggaagagctgccgccgggctggttctatagccgcattgtggcaacctcggtgctgggtgaagtgctgcactgcaaaggcgaattgacccgctcactggcgctaatgcagcaaaccgaacagatggcacgccagcacgatgtctggcactacgctttgtggagtttaatccagcaaagtgaaattctgtttgcccaagggttcctgcaaaccgcgtgggaaacgcaggaaaaagcattccagctgatcaacgagcagcatctggaacagctgccaatgcatgagtttctggtgcgcattcgtgcgcagctgttatgggcctgggcgcggctggatgaagccgaagcgtcggcgcgtagcgggattgaagtcttgtcgtcttatcagccacagcaacagcttcagtgcctggcaatgttgattcaatgctcgctggcccgtggtgatttagataacgcccgtagccagctgaaccgtctggaaaacctgctggggaatggcaaatatcacagcgactggatctctaacgccaacaaagtccgggtgatttactggcaaatgaccggcgataaagccgccgctgccaactggttgcgtcatacggctaaaccagagtttgcgaacaaccacttcctgcaaggtcaatggcgcaacattgcccgtgcacaaatcttgctgggcgagtttgaaccggcagaaattgttctcgaagaactcaatgaaaatgcccggagtctgcggttgatgagcgatctcaaccgtaacctgttgctgcttaatcaactgtactggcaggccggacgtaaaagtgacgcccagcgcgtgttgctggacgcattaaaactggcgaatcgcaccggatttatcagccattttgtcatcgaaggcgaagcgatggcgcaacaactgcgtcagctgattcagcttaatacgctgccggaactggaacagcatcgcgcgcagcgtattctgcgagaaatcaatcaacatcatcggcataaattcgcccatttcgatgagaatttcgttgaacgtctgctaaatcatcctgaagtacctgaactgatccgcaccagcccgctgacgcaacgtgaatggcaggtactggggctgatctactctggttacagcaatgagcaaattgccggagaactggaagtcgcggcaaccaccatcaaaacgcatatccgcaatctgtatcagaaactcggcgtggcccatcgccaggatgcggtacaacacgcccagcaattgctgaagatgatggggtacggcgtgtaagtttagccggataacgcgccagatccggcttacatctctgcatcattcaatgctcacccgcgttacgccatctgtttctatcaaactaaaccgcaccggcaagaaacgctccaccaccgcgatattggtcagcagatggcatgagggatgggcgaccgtaaattcccccgcgcccgccagcgccatcggtagcaccagttggtcagcaagatattcccccaccgccgccgtgcttgccaggtagcgtttcacctctttcaccaactgtgccgcaaccacctcggcactgacgcgcttttcaccgacgacaaaaaagcgttcggtgatattttcactttcgacttcaagcgagacggtattacccggcccctggtcgcgcggcaggttatgaatattctgttcatgcagggaaaaactccccgccagtgtagcgatttcacgctcagcaacatggcgcggcacaccagctaatagaacttctccacgcatctgcacaatgttcccgcgctcgccaagttgcaaggtgttaaacgatgccacgggcgagacttccgttgccaccacaccgcctccggcagggtaaaaaccgtggcgtaacagcgtggtttgctgatgaattcctattttcgccagcagcggctccagcacccggcggataaaatccgaggcggcgccgacgggttatcggtcgccgcgctcacttcaacacgcgaaggtccatcggcaaaccacagcgcgggcagcaccgtttgcagcaccagcgtacaacttccggcgctaccgatagcaaagcggtaatcgccgccgcgcacggtgccgggccggaagagcagacgctgcgaccccagctccgcgccttccacggttgctccgcaaatttccgtcgccgcctttaccgcggtcagatgctggcgcaacagccccggtttcgcccgcccggcacgaatgctggtgatggtaaatggctggccggttatcatcgacaggctcagcgccgagcgcaggatctgcccgccaccttcgccctgtgcgccatccagcgcaatcatccttttcatcatttatccttttacgcacaccacctgacgcagggtatagataacttccaccagatcgctttgtgccgccatcaccgcatcaatatctttatacgccatcgggatttcgtcgatcacttcggcatctttacggcattccacatgcgcggtggcacgaatttgatcttccacgctgaacagttttttcgctttagttcggctcattacccgcccggcaccgtggctgcacgaacagaacgactcttcatttcccagcccacggacgataaagctttttgctcccatcgaaccgggaataattccatattgaccagcacgcgcagacaccgcgcctttacgcgtcacgtagatctcttcaccaaagtgctgttctttttgcacatagttgtggtgacagttgatctcttccatcgccagcgtttgtggctgtctgaccgttttctgcgtaatgctctgcaatgccgttaccacgttttccatcatcgcatcgcggttaaggctggcaaaaagctgcgcccaggccacggctttcaggtaatcatcaaagtattccgtaccttccataaagtacgccagatcacgcgacggcaacgtctcaagcgtttcctgcatctctttttgtgccagatcgataaagtaagtcccgatggcgttaccaattccgcgtgaaccggagtgcagcataatccacacctggtccgactcatcaaggcagatttcaataaagtggttaccggttcccagcgttcccaggtgtttatagttattggtattcaggaaacggggatatttttgcgttaaccactgataaccggcttcaagctcagcccatttagcatcgacgttaacaggtggattttcccaggcacctttatcacgtttacaacggccagtggtacgcccgtgcggcacggccgtttcaatcgcctgacgcagctctgccaggttttcaggcaggtcttccgccgttaacgcggtacgcagcgcgttcattccacagccaatatccacgcccaccgccgccggaataatcgcccctttggtcgggatcacgctaccaatggtggaacctttacccaggtgtacatcaggcattaccgcaatatgtttgaaaataaacggcatcttcgccgtattaataagttgctgacgcgcatcggcctctaccggcacgcctttggtccacatttttaccggggcattttcagtggtcagtaattcgtaattcattttgtttttctcttttcgttgtttgctgtcctgataattgcaaccgtcgtgccagaaaattaaataagcagcttaattttttaattcattgttttaaaaaagattatatctttacgtccgtaaccggagatttcccgcaaagccaatttaccgataatgaaatatcgtcttttataaggatatctaagatgcgtaaaacagtggcttttggctttgtcggtaccgtactggattatgccgggcgcggcagtcagcgctggtcaaaatggcgtccgacactctgtttatgccagcaagaatcgttggtcatcgatcgactggaattgttgcacgacgcccgctcgcgctcgctatttgaaacgcttaaacgcgatatcgccagcgtttcgccagaaacagaagtggtgagcgttgagattgaactgcataacccgtgggatttcgaagaggtctacgcctgcctgcatgatttcgcccgtggttacgagtttcagccagaaaaagaagactatttaattcacatcaccaccggtacccacgtcgcgcagatttgctggtttctgctggcagaagcgcgttacctgcccgcccggctgatacaatcttcacctccgcgcaaaaaagaacagccgcgcggcccaggtgaagtaacgattatcgatctcgatttaagccgttataacgccatcgccagccgctttgccgaggaacgccagcaaacgcttgattttcttaagtccggcattgccacgcgtaacccccacttcaaccgcatgattgagcagatcgaaaaagtggcgatcaaatcccgcgcgccgattctgcttaacggtccaaccggcgcgggcaagtcatttctggcgcgacgcatcttagagttaaaacaggcgcggcatcagtttagcggcgcgtttgtggaagtgaactgcgccaccctgcgcggcgataccgccatgtcgacgctgtttggtcatgtaaaaggcgcgtttaccggggcgcgggaatctcgtgaaggtttattacgcagcgccaacggcggaatgttgtttcttgatgagattggcgaactgggcgcagacgaacaggcaatgctgctgaaagccattgaagagaaaaccttttacccgtttggcagcgatcgccaggtgagcagtgattttcagcttatcgccggaacggtgcgcgatttgcgccagctggttgccgaaggcaaatttcgcgaagatctgtacgcgcggatcaatctctggaccttcaccctgccgggtctacgccagcgccaggaagatattgaaccgaacctggattatgaagtggagcgccacgcctcactcactggcgacagcgtgcgttttaacaccgaagcgcggcgcgcctggttggcttttgcgacctctccccaggcaacatggcgcggtaactttcgcgaactttctgccagcgtcacgcggatggccacctttgccactagcggacgcatcactctggacgtggttgaagatgagataaaccgtctgcgctataactggcaggagagccgcccctccgcgcttacggcgttgctgggcgcagaggcagaaaacatcgatctcttcgaccgtatgcaactggaacacgttatcgctatctgccgccaggcaaagtcgctttccgcagccggacgccagctttttgacgtttcgcgccagggcaaagccagcgtcaatgacgcggatcggctacgcaaatacctggcgcgttttggtctgacgtgggaagccgtgcaggatcagcacagctccagttgaatatggtggtccgtcagcacctgcatcacgcttactggcggcggggcgtcggtgtagacggcatctaccatgctgatgctgcccatattgaccatcgcgttacggccaaatttcgagtgatcgacaaccagcataacgtggcgcgagttctcaataatggcgcgtttggtgcgaacttcgtggtaatcgaactccagcagcgagccgtcgctatcgatgccgcttatccccagaatgccgaaatcaaggcggaactgggagataaaatcgagcgtcgcttcgccaatgatcccgccatcgcggctgcgtaattcgccaccggcgagaatgatgcgaaaatcttcttttaccatcaacgtgttagcaacgttgagattgttggtgacaatgcgcaaattgctgtgattgagcagtgcgtgcgctaccgcttccggcgtggtgccgatatcgataaacagcgtcgagccattggggatttgctccgccactttgcgggcgatgcgctctttttcttcggtctgggtggccttgcgatcgtgccacggcgtgttaaccgaactggaaggcagcgccgcaccgccatgatggcgcaggatcaggttttgctccgccagctcattgaggtcgcggcgaatagtctgcgggctgacggagaaatgctctaccagctcttcggtactgacataaccctgctgtttaaccagttcgataataccgttgtgacgttgtgtttgtttcatttataaatccctggaattattttcgttttcgcgcattgagcgaatcaacaaaagccatcgctaaacccacggctaacccggcgatgtgtgctccgttcgccatcgacatcccaaacaaatcaaaccatccggcgacaatccagatcagcgcaaagataattaacccacgttgcaggtaaatgccactttgcggatcgcgttcgccacgtagccagacgtagcccatcagcgcatacaccacgccagaaagcccgccaaaccacggcccgctgaatttttgctgcacatagccgcttaacagggcgctgataagcgtaatgacaattagcttaccgctaccgaggcgtttttccaccgcaccgccgagataccaccaccagagcaggttaaagaggatatgcatcagcgagaagtgcattaacgcgtgggtgaagtaacgccagaactcaaatttcagtgttggatcgaatggccaggccagccataacatcacttcctgatcgccgagaatttgcatggcaataaacaccaccacgcaggcgatcatcatcacccaggttaccggacctgcgcgttcacgcaaggcggcaaagaaaggataacggcgataatgcaggccactgccggtatggcctgcctgccagctcgccgccagataacgcggatctgccgggttttcgagaaaacgcgccacgtccgcccgtacgcgctcggcctgggactcatccgccagccagacatcgctttggttatgttgttgaatcgtgaggataacaccctgcgtcgccatgtaatcaacaaacgcctgcgccacgcgggggttagcaaaagaggtaatcatcaacatcgttgctgtcgcttattccacacaaaaggggacagtataaagcgttacgcgccgtacgccacctctgcgggaaactgacgttgccaggcttcaaagccgccgtcaatgctatagaccacatcgtagccctgttgcagcagatactgcgccgcgcctttgctgctattgccgtgataacacatcaccatcaccggagtgtcaaagtcgttatcacgcataaaagcgcccagcgtgtcgttggttaaatggaaagcctgcaccgcatgtcccattgcgaaactctgtggatcgcgaatatcgaccagcaccgcctctttttcctgcaacttctggtgcgcgtcggcaacgttaatacattcgaactgatccatgcgtctctctttctttacaaacaagtgggcaaatttaccgcacagtttacgtcgaagcggcagataaacgccataatgttatacatatcactctaaaatgttttttcaatgttacctaaagcgcgattctttgctaatatgttcgataacgaacatttatgagctttaacgaaagtgaatgagggcagcatggaaaccaaagatctgattgtgatagggggcggcatcaatggtgctggtatcgcggcagacgccgctggacgcggtttatccgtgctgatgctggaggcgcaggatctcgcttgcgcgacctcttccgccagttcaaaactcattcacggtggcctgcgctaccttgagcactatgaattccgcctggtcagcgaggcgctggctgaacgtgaagtgctgctgaaaatggccccgcatatcgccttcccgatgcgttttcgcctgccacatcgtccgcatctgcgcccggcgtggatgattcgcattggtctgtttatgtacgatcatctgggtaaacgcaccagcttgccgggatcaactggtttgcgttttggcgcaaattcagtgttaaaaccggaaattaagcgcggattcgaatattctgactgttgggtagacgacgcccgtctggtactcgccaacgcccagatggtggtgcgtaaaggcggcgaagtgcttactcggactcgcgccacctctgctcgccgcgaaaacggcctgtggattgtggaagcggaagatatcgataccggcaaaaaatatagctggcaagcgcgcggcttggttaacgccaccggcccgtgggtgaaacagttcttcgacgacgggatgcatctgccttcgccttatggcattcgcctgatcaaaggcagccatattgtggtgccgcgcgtgcatacccagaagcaagcctacattctgcaaaacgaagataaacgtattgtgttcgtgatcccgtggatggacgagttttccatcatcggcactaccgatgtcgagtacaaaggcgatccgaaagcggtgaagattgaagagagtgaaatcaattacctgctgaatgtgtataacacgcactttaaaaagcagttaagccgtgacgatatcgtctggacctactccggtgtgcgtccgctgtgtgatgatgagtccgactcgccgcaggctattacccgtgattacacccttgatattcatgatgaaaatggcaaagcaccgctgctgtcggtattcggcggtaagctgaccacctaccgaaaactggcggaacatgcgctggaaaaactaacgccgtattatcagggtattggcccggcatggacgaaagagagtgtgctaccgggtggcgccattgaaggcgaccgcgacgattatgccgctcgcctgcgccgccgctatccgttcctgactgaatcgctggcgcgtcattacgctcgcacttacggcagcaacagcgagctgctgctcggcaatgcgggaacggtaagcgatctcggggaagatttcggtcatgagttctacgaagcggagctgaaatacctggtggatcacgaatgggtccgccgcgccgacgacgccctgtggcgtcgcacaaaacaaggcatgtggctaaatgcggatcaacaatctcgtgtgagtcagtggctggtggagtatacgcagcagaggttatcgctggcgtcgtaaattaacgtaaggtgatcaggtcagatttcaatctggcctgagactgatgacaaacacaaaactgcctgatgcgctacgcttatcaggcctacgtggtttatgcaatatattgaatttgcatggtcttgtag

SEQ ID NO: 23 - protein, 501 aa, Escherichia coli
METKDLIVIGGGINGAGIAADAAGRGLSVLMLEAQDLACATSSASSKLIHGGLRYLEHYEFRLVSEALAEREVLLKMAPHIAFPMRFRLPHRPHLRPAWMIRIGLFMYDHLGKRTSLPGSTGLRFGANSVLKPEIKRGFEYSDCWVDDARLVLANAQMVVRKGGEVLTRTRATSARRENGLWIVEAEDIDTGKKYSWQARGLVNATGPWVKQFFDDGMHLPSPYGIRLIKGSHIVVPRVHTQKQAYILQNEDKRIVFVIPWMDEFSIIGTTDVEYKGDPKAVKIEESEINYLLNVYNTHFKKQLSRDDIVWTYSGVRPLCDDESDSPQAITRDYTLDIHDENGKAPLLSVFGGKLTTYRKLAEHALEKLTPYYQGIGPAWTKESVLPGGAIEGDRDDYAARLRRRYPFLTESLARHYARTYGSNSELLLGNAGTVSDLGEDFGHEFYEAELKYLVDHEWVRRADDALWRRTKQGMWLNADQQSRVSQWLVEYTQQRLSLAS

SEQ ID NO: 24 - DNA, 15067 bp, Escherichia coli
ataacagcaatcaaggaaaaggggaaaatcagcaattttctgaaagagatgccctttccggcggcaaagggcatcatggtaaatcagttatagttaatcttaaaaagcaccactgtatcgaaggggccagcctcgatgggggtgcctggaatggacgaaagttcagccgtataggttttttcgtagaccaacatgtcactggtgaaatcggcgtattcagcatatttattgaaggtataaggcgaggcgttttcatccagtaaacgtagcttcagaccattaccaatcaacaatgctttatcttcttcaaccaacgtttcttcggtataaaaggaggaactgactttaaatccgtcggtgcattgatcgttttggctcttggtcgttttaatactgaacgttttcgacattgtgtggcgacgtatatccagcaaattaaatttaccaaaatcaatcacctgtgtttccggtgaaatggaaaaattgacgctgcaatccagcacgcgaatgttttccagaccagtaatatgatatttcaggttttgggcagtagggtcttcgttaacgctaccggcaccgtcaaattgcacgacgatatagtcgctaagcgtactttgataatcatgcggcggcatttctcgtattttgacgtataaccgcatgcgagcgagaaaggtacgcgacatatgaatattagcgggatcgcccgagcaaattttgttctgccatcccatcgcgatgatctgctcaggggtataaatatcaatgttcttactgtcgatacactggttagtgtcgatgcgactttttcccagactggcatcgtaatcgacaccgttgtatgtcacgccgagttgataataacgatcctgcacccccggataggggtttacccaggcgtagacatgctcgctttcaaagttgccgttggtattgttgtcacaatagacgggaattttaatatcgtcagattcccagatcttatcaccgggtttggcattgcctggtacagcaaacggttgaatcgcttctgatttttctactgcgccaccagatgtaccaaaatagcagttcagcgccattgcagacttcaacggcagaaataacaggcagatgacgagcaacaatcccttgccagcactcatttcgcctccactgcttgtaaacggcattgtccgctgcagttgagcgtcgtcatgcgtaatgcgccgtaatcatccatgtaaccgagataaaactggctgccgctataacttccggtgtttgtgttgaccgtactaaaaggtgcaaccatcacggttttgaagcctgggagaacgcctttttcatttctccccagataggcaatggtcagataatacgcggtaggatttttcagtgtcagttggttgccctgctggctgacctgtaactgcagttcgaccttttctcctgctttcttgcgtaatgcagccggtcgccagaacaatttaatacgactttgaatagcgacctgaagtatcgcatggtcgctgcttttatccggagcgggaggaatttcgcgcatattgtagaaaaatagcgtttcgcgatcgccaggtaattgtgtggttgaggcttgtttcacaacccgcacctgcgatgtcgctttcggttccagacgttgaatagggggcaaagcgaccagaagagcatcgcttttctcccctttttcattttctatccaggaataagcaagataaggcagtttgtcactttggttttcgatacgcaggctggtggctttgtcattggcgttaaacacaatgcgtgtgcgatcgggttgcaccgcagcattgcaacccaagctgatggttaacaacattaagggtaatcctttaataaatgtcattctcttttccttaattaatgacaaggtaaaatcaggcgtttggtcgtgtcttccagacgttctggcagatgaataatgcagctttgctcaccccagaccacggtaaacagttgattttcagcgacaccgcttaaccaggcatgtccttcctcgccaaccatacccacgctaatgccgctgtcatcctggcggatatccgcaccgaggggagggaactgaccgctggcgttgcgtatgatgacgttaacgtctttaccggaacgggaagccagtgatttgtaacctatcgcgccttcaatccatgtttccttgatgacgttttctgcaactgttacgccgtcgggtaagtcattcatgttcaccgccacggtggaaggctggtaactggaaatcaacggcaccaccgcaatgccaaaatggttggtgtagtcgagattgccctgaaccggaatatctgccacgccatcggtgctgaccatcaggcgtggttcattggtggagctgcggcgatgaaatgctgcaccatattgggttgcggtgaaagaaccgctccagctgctgctgacggaactgtaatcactggcggcataggtaccagaaatatcccactcacccgctgaactcaggtgctgatagttaccgctcacctgggctccattgtccggacgatcggattgcagtccggcagacatgccccagctattacgttcatccagcgtatcgttccacgacatgcggtgtatggtgctgtggctactgttttgcatgtcatagccaacccgaccaccgttaccgaaggggagcgaaatcgacagataaatctggttgtcgcgatctttatcttcgtagtgggtcgtattgaatgacgtcgaaatcgagatatctctccagtcaccaatatcaacattaaaacctgctgtgatgttggcggtcgtggaggcgtctgcattccaccaggtttgatgtagcaggttggcgtaaagattgaggtttagtggggtaatcggttggcccacggataagctgatcgtctgtttttcgtcctgcgcatcgctgtcgttgtatttgtgatccagatagttggcgtagctgtgaaaatgacgatctgagaagcgataagcggcgagcgaaatcgtgctgttggtggcatccacttgtttgctgtaattaaaacggtagcttaagccccgctcgtcctgctgagtatcaaaatggctactggcccaggtgacatcaaaggacagtgcgccaagccacagcatattttgcccgatacccattgcggcagaatggtagtcatcatcagaaatcagcaggccgccgtacagcgaggtgtttgagagcatcccccaggaaacttcattgctaaaaaaggtttcattttcagtttgatgtgacatggaaggccgtggctgacccgcggccaatttatagcgaacctgtccctggcgagtcaggaagggcgtcgatgctgccgaaacctggaaattgttcacccgaccatcttcttccgtcactttgacatccagcgtgccctgaacagactgattgaggtcatcaataataaacgggcctggcgggacttttttctggtaaatgacgcggcctgattgactgatcgtcaccgtggcattggtctgtgcaataccgctaatttgtggggcgtagccacgcagctcccacggtaacattcgatcgtcactcgccagtgccgcgccggtataagaaaaaccatcgaaaatattggaactgaaatcggtttcgccgagggttaacttagagcctaattgcggtaatggacgaaaaagataggtgcgcgatattccgcctgactggtcatggttatcttcgctatcggtcttattaagctggtaatcactgcgtaagcgccatgccccggcgttaattccggcggtaccgtaggcattcaggttagtgctgctgctgccgtcctgtgggcggtagctgctggcaaacaagttgtaatccatcaggacaccggcaacaccttctttccatgtagaggggggagcccagttttctgagtgccacgccagccaggcttgcggaatactaatattcagttgctgattggcttgatcgaaattgaagagcatttcaggtcgggaactgaaatcaatacaccgatctatctgtggcaaggactgacggatatctggttttaaaccaaatttatcgaccagtgaatcattgatgcatggaatggttttgtcaccctttttttgccagttaattttttgcccattactgattttgttgttattcaccgcaacgctaacaaaatattcaccgggagcaatgactcctttttcctttaataatgaaatatcaatgcggtcgcgcattgatttatcgagaacattcagattgaattcgaccgccattgcgcaaggcatcgccatgaccaggcaggatacaaaagagagtcgataaatattcacggtgtccatacctgataaatattttatgaaaggcggcgatgatgccgccaaaataatacttatttataatccagcacgtaggttgcgttagcggttacttcacctgccgtgacatcgactgcattatcaatttgttccatccaggcgaaaaagttcagcgtctgttctgatgagcttgcatccaggtcaagatctggcgcggctgaacctaatacgatgttaccgtcatttttgtccatcagtcgtacaccgaccccagttgcttcgcctgcactggtgttgctcaacaaaggcgtagcaccagttgtcttagccgtgctatcgaaggttacgccaactttggataccggcattccgctaccgttgtcagaagcaggcagatcacagttgatcaagcgaatgtcgacggccactttattgctatgatgctcccggtttatatgggttgtcgtgacttgtccaagatctatgtttttatcaatatcttctggatgaatttcacaaggtgcttcaataacctcccccttaaagtgaatttcgccagaaccttcatcagcagcataaacaggtgcagtgaacagcagagatacggccagtgcggccaatgttttttgtcctttaaacataacagagtcctttaaggatatagaataggggtatagctacgccagaatatcgtatttgattattgctagtttttagttttgcttaaaaatattgttagttttattaaatgcaaaactaaattattggtatcatgaatttgttgtatgatgaataaaatataggggggtatagatagacgtcattttcatagggttataaatgcgactaccatgaagtttttaattgaaagtattgggttgctgataatttgagctgttctattctttttaaatatctatataggtctgttaatggattttatttttacaattttttgtgtttaggcatataaaaatcaacccgccatatgaacggcgggttaaaatatttacaacttagcaatcaaccattaacgcttgatatcgcttttaaagtcgcgtttttcatatcctgtatacagctgacgcggacgggcaatcttcataccgtcactgtgcatttcgctccagtgggcgatccagccaacggtacgtgccattgcgaaaatgacggtgaacatggaagacggaatacccatcgctttcaggatgataccagagtagaaatcgacgttcgggtacagtttcttctcgataaagtacgggtcgttcagcgcgatgttttccagctccatagccacttccagcaggtcatccttcgtgcccagctctttcagcacttcatggcaggtttcacgcattacggtggcgcgcgggtcgtaatttttgtacacgcggtgaccgaagcccatcaggcggaaagaatcatttttgtctttcgcacgacgaacaaattccggaatgtgtttaacggagctgatttcttccagcattttcagcgccgcttcgttagcaccgccgtgcgcaggtccccacagtgaagcaatacctgctgcgatacaggcaaacgggttcgcacccgaagagccagcggtacgcacggtggaggtagaggcgttctgttcatggtcagcgtgcaggatcagaatacggtccatagcacgttccagaatcggattaacttcatacggttcgcacggcgtggagaacatcatattcaggaagttaccggcgtaggagagatcgttgcgcgggtaaacaaatggctgaccaatggaatacttgtaacacatcgcggccatggtcggcattttcgacagcaggcggaacgcggcaatttcacggtgacgaggattgttaacatccagcgagtcgtgatagaacgccgccagcgcgccggtaataccacacatgactgccattggatgcgagtcgcgacggaaagcatggaacagacgggtaatctgctcgtggatcatggtatgacgggtcaccgtagttttaaattcgtcatactgttcctgagtcggtttttcaccattcagcaggatgtaacaaacttccaggtagttagaatcggtcgccagctgatcgatcgggaaaccgcggtgcagcaaaataccttcatcaccatcaataaaagtaattttagattcgcaggatgcggttgaagtgaagcctgggtcaaaggtgaacacaccttttgaaccgagagtacggatatcaataacatcttgacccagcgtgcctttcagcacatccagttcaacagctgtatccccgttgagggtgagttttgcttttgtatcagccatttaaggtctccttagcgccttattgcgtaagactgccggaacttaaatttgccttcgcacatcaacctggctttacccgttttttatttggctcgccgctctgtgaaagaggggaaaacctgggtacagagctctgggcgcttgcaggtaaaggatccattgatgacgaataaatggcgaatcaagtacttagcaatccgaattattaaacttgtctaccactaataactgtcccgaatgaattggtcaatacttccacactgttacataagttaatcttaggtgaaataccgacttcataacttttacgcattatatgcttttcctggtaatgtttgtaacaactttgttgaatgattgtcaaattagatgattaaaaattaaataaatgttgttatcgtgacctggatcactgttcaggataaaacccgacaaactatatgtaggttaattgtaatgattttgtgaacagcctatactgccgccaggtctccggaacaccctgcaatcccgagccacccagcgttgtaacgtgtcgttttcgcatctggaagcagtgttttgcatgacgcgcagttatagaaaggacgctgtctgacccgcaagcagaccggaggaaggaaatcccgacgtctccaggtaacagaaagttaacctctgtgcccgtagtccccagggaataataagaacagcatgtgggcgttattcatgataagaaatgtgaaaaaacaaagacctgttaatctggacctacagaccatccggttccccatcacggcgatagcgtccattctccatcgcgtttccggtgtgatcacctttgttgcagtgggcatcctgctgtggcttctgggtaccagcctctcttcccctgaaggtttcgagcaagcttccgcgattatgggcagcttcttcgtcaaatttatcatgtggggcatccttaccgctctggcgtatcacgtcgtcgtaggtattcgccacatgatgatggattttggctatctggaagaaacattcgaagcgggtaaacgctccgccaaaatctcctttgttattactgtcgtgctttcacttctcgcaggagtcctcgtatggtaagcaacgcctccgcattaggacgcaatggcgtacatgatttcatcctcgttcgcgctaccgctatcgtcctgacgctctacatcatttatatggtcggttttttcgctaccagtggcgagctgacatatgaagtctggatcggtttcttcgcctctgcgttcaccaaagtgttcaccctgctggcgctgttttctatcttgatccatgcctggatcggcatgtggcaggtgttgaccgactacgttaaaccgctggctttgcgcctgatgctgcaactggtgattgtcgttgcactggtggtttacgtgatttatggattcgttgtggtgtggggtgtgtgatgaaattgccagtcagagaatttgatgcagttgtgattggtgccggtggcgcaggtatgcgcgcggcgctgcaaatttcccagagcggccagacctgtgcgctgctctctaaagtcttcccgacccgttcccataccgtttctgcgcaaggcggcattaccgttgcgctgggtaatacccatgaagataactgggaatggcatatgtacgacaccgtgaaagggtcggactatatcggtgaccaggacgcgattgaatatatgtgtaaaaccgggccggaagcgattctggaactcgaacacatgggcctgccgttctcgcgtctcgatgatggtcgtatctatcaacgtccgtttggcggtcagtcgaaaaacttcggcggcgagcaggcggcacgcactgcggcagcagctgaccgtaccggtcacgcactgttgcacacgctttatcagcagaacctgaaaaaccacaccaccattttctccgagtggtatgcgctggatctggtgaaaaaccaggatggcgcggtggtgggttgtaccgcactgtgcatcgaaaccggtgaagtggtttatttcaaagcccgcgctaccgtgctggcgactggcggagcagggcgtatttatcagtccaccaccaacgcccacattaacaccggcgacggtgtcggcatggctatccgtgccggcgtaccggtgcaggatatggaaatgtggcagttccacccgaccggcattgccggtgcgggcgtactggtcaccgaaggttgccgtggtgaaggcggttatctgctgaacaaacatggcgaacgttttatggagcgttatgcgccgaacgccaaagacctggcgggccgtgacgtggttgcgcgttccatcatgatcgaaatccgtgaaggtcgcggctgtgatggtccgtgggggccacacgcgaaactgaaactcgatcacctgggtaaagaagttctcgaatcccgtctgccgggtatcctggagctttcccgtaccttcgctcacgtcgatccggtgaaagagccgattccggttatcccaacctgtcactacatgatgggcggtattccgaccaaagttaccggtcaggcactgactgtgaatgagaaaggcgaagatgtggttgttccgggactgtttgccgttggtgaaatcgcttgtgtatcggtacacggcgctaaccgtctgggcggcaactcgctgctggacctggtggtctttggtcgcgcggcaggtctgcatctgcaagagtctatcgccgagcagggcgcactgcgcgatgccagcgagtctgatgttgaagcgtctctggatcgcctgaaccgctggaacaataatcgtaacggtgaagatccggtggcgatccgtaaagcgctgcaagaatgtatgcagcataacttctcggtcttccgtgaaggtgatgcgatggcgaaagggcttgagcagttgaaagtgatccgcgagcgtctgaaaaatgcccgtctggatgacacttccagcgagttcaacacccagcgcgttgagtgcctggaactggataacctgatggaaacggcgtatgcaacggctgtttctgccaacttccgtaccgaaagccgtggcgcgcatagccgcttcgacttcccggatcgtgatgatgaaaactggctgtgccactccctgtatctgccagagtcggaatccatgacgcgccgaagcgtcaacatggaaccgaaactgcgcccggcattcccgccgaagattcgtacttactaatgcggagacaggaaaatgagactcgagttttcaatttatcgctataacccggatgttgatgatgctccgcgtatgcaggattacaccctggaagcggatgaaggtcgcgacatgatgctgctggatgcgcttatccagctaaaagagaaagatcccagcctgtcgttccgccgctcctgccgtgaaggtgtgtgcggttccgacggtctgaacatgaacggcaagaatggtctggcctgtattaccccgatttcggcactcaaccagccgggcaagaagattgtgattcgcccgctgccaggtttaccggtgatccgcgatttggtggtagacatgggacaattctatgcgcaatatgagaaaattaagccttacctgttgaataatggacaaaatccgccagctcgcgagcatttacagatgccagagcagcgcgaaaaactcgacgggctgtatgaatgtattctctgcgcatgttgttcaacctcttgtccgtctttctggtggaatcccgataagtttatcggcccggcaggcttgttagcggcatatcgtttcctgattgatagccgtgataccgagactgacagccgcctcgacggtttgagtgatgcattcagcgtattccgctgtcacagcatcatgaactgcgtcagtgtatgtccgaaggggctgaacccgacgcgcgccatcggccatatcaagtcgatgttgttgcaacgtaatgcgtaaaccgtaggcctgataagacgcgcaagcgtcgcatcaggcaaccagtgccggatgcggcgtgaacgccttatccggcctacaagtcattacccgtaggcctgataagcgcagcgcatcaggcgtaacaaagaaatgcaggaaatctttaaaaactgcccctgacactaagacagtttttaaaggttccttcgcgagccactacgtagacaagagctcgcaagtgaaccccggcacgcacatcactgtgcgtggtagtatccacggcgaagtaagcataaaaaagatgcttaagggatcacgatgcagaacagcgctttgaaagcctggttggactcttcttacctctctggcgcaaaccagagctggatagaacagctctatgaagacttcttaaccgatcctgactcggttgacgctaactggcgttcgacgttccagcagttacctggtacgggagtcaaaccggatcaattccactctcaaacgcgtgaatatttccgccgcctggcgaaagacgcttcacgttactcttcaacgatctccgaccctgacaccaatgtgaagcaggttaaagtcctgcagctcattaacgcataccgcttccgtggtcaccagcatgcgaatctcgatccgctgggactgtggcagcaagataaagtggccgatctggatccgtctttccacgatctgaccgaagcagacttccaggagaccttcaacgtcggttcatttgccagcggcaaagaaaccatgaaactcggcgagctgctggaagccctcaagcaaacctactgcggcccgattggtgccgagtatatgcacattaccagcaccgaagaaaaacgctggatccaacagcgtatcgagtctggtcgcgcgactttcaatagcgaagagaaaaaacgcttcttaagcgaactgaccgccgctgaaggtcttgaacgttacctcggcgcaaaattccctggcgcaaaacgcttctcgctggaaggcggtgacgcgttaatcccgatgcttaaagagatgatccgccacgctggcaacagcggcacccgcgaagtggttctcgggatggcgcaccgtggtcgtctgaacgtgctggtgaacgtgctgggtaaaaaaccgcaagacttgttcgacgagttcgccggtaaacataaagaacacctcggcacgggtgacgtgaaataccacatgggcttctcgtctgacttccagaccgatggcggcctggtgcacctggcgctggcgtttaacccgtctcaccttgagattgtaagcccggtagttatcggttctgttcgtgcccgtctggacagacttgatgagccgagcagcaacaaagtgctgccaatcaccatccacggtgacgccgcagtgaccgggcagggcgtggttcaggaaaccctgaacatgtcgaaagcgcgtggttatgaagttggcggtacggtacgtatcgttatcaacaaccaggttggtttcaccacctctaatccgctggatgcccgttctacgccgtactgtactgatatcggtaagatggttcaggccccgattttccacgttaacgcggacgatccggaagccgttgcctttgtgacccgtctggcgctcgatttccgtaacacctttaaacgtgatgtcttcatcgacctggtgtgctaccgccgtcacggccacaacgaagccgacgagccgagcgcaacccagccgctgatgtatcagaaaatcaaaaaacatccgacaccgcgcaaaatctacgctgacaagctggagcaggaaaaagtggcgacgctggaagatgccaccgagatggttaacctgtaccgcgatgcgctggatgctggcgattgcgtagtggcagagtggcgtccgatgaacatgcactctttcacctggtcgccgtacctcaaccacgaatgggacgaagagtacccgaacaaagttgagatgaagcgcctgcaggagctggcgaaacgcatcagcacggtgccggaagcagttgaaatgcagtctcgcgttgccaagatttatggcgatcgccaggcgatggctgccggtgagaaactgttcgactggggcggtgcggaaaacctcgcttacgccacgctggttgatgaaggcattccggttcgcctgtcgggtgaagactccggtcgcggtaccttcttccaccgccacgcggtgatccacaaccagtctaacggttccacttacacgccgctgcaacatatccataacgggcagggcgcgttccgtgtctgggactccgtactgtctgaagaagcagtgctggcgtttgaatatggttatgccaccgcagaaccacgcactctgaccatctgggaagcgcagttcggtgacttcgccaacggtgcgcaggtggttatcgaccagttcatctcctctggcgaacagaaatggggccggatgtgtggtctggtgatgttgctgccgcacggttacgaagggcaggggccggagcactcctccgcgcgtctggaacgttatctgcaactttgtgctgagcaaaacatgcaggtttgcgtaccgtctaccccggcacaggtttaccacatgctgcgtcgtcaggcgctgcgcgggatgcgtcgtccgctggtcgtgatgtcgccgaaatccctgctgcgtcatccgctggcggtttccagcctcgaagaactggcgaacggcaccttcctgccagccatcggtgaaatcgacgagcttgatccgaagggcgtgaagcgcgtagtgatgtgttctggtaaggtttattacgacctgctggaacagcgtcgtaagaacaatcaacacgatgtcgccattgtgcgtatcgagcaactctacccgttcccgcataaagcgatgcaggaagtgttgcagcagtttgctcacgtcaaggattttgtctggtgccaggaagagccgctcaaccagggcgcatggtactgcagccagcatcatttccgtgaagtgattccgtttggggcttctctgcgttatgcaggccgcccggcctccgcctctccggcggtagggtatatgtccgttcaccagaaacagcaacaagatctggttaatgacgcgctgaacgtcgaataaataaaggatacacaatgagtagcgtagatattctggtccctgacctgcctgaatccgtagccgatgccaccgtcgcaacctggcataaaaaacccggcgacgcagtcgtacgtgatgaagtgctggtagaaatcgaaactgacaaagtggtactggaagtaccggcatcagcagacggcattctggatgcggttctggaagatgaaggtacaacggtaacgtctcgtcagatccttggtcgcctgcgtgaaggcaacagcgccggtaaagaaaccagcgccaaatctgaagagaaagcgtccactccggcgcaacgccagcaggcgtctctggaagagcaaaacaacgatgcgttaagcccggcgatccgtcgcctgctggctgaacacaatctcgacgccagcgccattaaaggcaccggtgtgggtggtcgtctgactcgtgaagatgtggaaaaacatctggcgaaagccccggcgaaagagtctgctccggcagcggctgctccggcggcgcaaccggctctggctgcacgtagtgaaaaacgtgtcccgatgactcgcctgcgtaagcgtgtggcagagcgtctgctggaagcgaaaaactccaccgccatgctgaccacgttcaacgaagtcaacatgaagccgattatggatctgcgtaagcagtacggtgaagcgtttgaaaaacgccacggcatccgtctgggctttatgtccttctacgtgaaagcggtggttgaagccctgaaacgttacccggaagtgaacgcttctatcgacggcgatgacgtggtttaccacaactatttcgacgtcagcatggcggtttctacgccgcgcggcctggtgacgccggttctgcgtgatgtcgataccctcggcatggcagacatcgagaagaaaatcaaagagctggcagtcaaaggccgtgacggcaagctgaccgttgaagatctgaccggtggtaacttcaccatcaccaacggtggtgtgttcggttccctgatgtctacgccgatcatcaacccgccgcagagcgcaattctgggtatgcacgctatcaaagatcgtccgatggcggtgaatggtcaggttgagatcctgccgatgatgtacctggcgctgtcctacgatcaccgtctgatcgatggtcgcgaatccgtgggcttcctggtaacgatcaaagagttgctggaagatccgacgcgtctgctgctggacgtgtagtagtttaagtttcacctgcactgtagaccggataaggcattatcgccttctccggcaattgaagcctgatgcgacgctgacgcgtcttatcaggcctacgggaccaccaatgtaggtcggataaggcgcaagcgccgcatccgacaagcgatgcctgatgtgacg

SEQ ID NO: 25 - protein, 427 aa, Escherichia coli
  complement of position 5348-6631 of seq id 24
MADTKAKLTLNGDTAVELDVLKGTLGQDVIDIRTLGSKGVFTFDPGFTSTASCESKITFIDGDEGILLHRGFPIDQLATDSNYLEVCYILLNGEKPTQEQYDEFKTTVTRHTMIHEQITRLFHAFRRDSHPMAVMCGITGALAAFYHDSLDVNNPRHREIAAFRLLSKMPTMAAMCYKYSIGQPFVYPRNDLSYAGNFLNMMFSTPCEPYEVNPILERAMDRILILHADHEQNASTSTVRTAGSSGANPFACIAAGIASLWGPAHGGANEAALKMLEEISSVKHIPEFVRRAKDKNDSFRLMGFGHRVYKNYDPRATVMRETCHEVLKELGTKDDLLEVAMELENIALNDPYFIEKKLYPNVDFYSGIILKAMGIPSSMFTVIFAMARTVGWIAHWSEMHSDGMKIARPRQLYTGYEKRDFKSDIKR

SEQ ID NO: 26 - DNA, 12354 bp, Escherichia coli
  CDS (10196)..(11146)
gacagcgcgttttgggctacgccggaaaatttgccaacaatttaccgcaagccgcgcgtcatgtacatggaacatccttttgccgcttcagaaatctctggatcatgctcgcatgttgcgcaatctactcgcccgtccgctgcgcttttccttatactgagactgagcgtcgattcacctgcaaacggcgcatttttagaataatcctgaccttgtgcggaagagaaaacatgaaaattcgcgccttattggtagcaatgagcgtggcaacggtactgactggttgccagaatatggactccaacggactgctctcatcaggagcggaagcttttcaggcttacagtttgagtgatgcgcaggtgaaaaccctgagcgatcaggcatgtcaggagatggacagcaaggcgacgattgcgccagccaatagcgaatacgctaaacgtctgacaactattgccaatgcgctaggcaacaatatcaacggtcagccggtaaattacaaagtgtatatggcgaaggatgtgaacgcctttgcaatggctaacggctgtatccgcgtctatagcgggctgatggatatgatgacggataacgaagtcgaagcggtgatcggtcacgaaatggggcacgtggcgttaggccatgtgaaaaaaggaatgcaggtggcacttggtacaaatgccgtgcgagtagctgcggcctctgcgggcgggattgtcggaagtttatctcaatcacaacttggtaatctgggcgagaaattagtcaattcgcaattctcccagcgccaggaagcagaagccgatgattattcttacgatcttctgcgccaacgcggcatcagcccggcaggtcttgccaccagctttgaaaaactggcaaaactggaagaaggtcgccaaagctcaatgtttgacgaccatcctgcatccgccgaacgcgcccagcatattcgcgatcgcatgagcgcggatgggattaagtaaagcctggtggtgtcgaacgtaggtcagataaggcgttcacgccgcatctgacatgaatggcacatttgttaccttgtgcgcattgccggatgcgatgctggcgcatcttatccggcctacgggtgccgaacgtaggtcggataaggcgttcacgccgcatccgacattaatggcacgttttacccgtgcgcatcgcatctggtgcttactcgccctttttcgccgcctgaatatacagcatttccagcgccagcgttgccgctgccagagcagtgatttccgactgatcgtatgccggagccacttccactacgtccatcccaacaatgttgagatctttcaggccgcgtaccagtttaatagcgcgatcggaggtcaggccgccaatcactggcgtaccggtgcctggtgcaaaagcaggatccaggcagtcgatatcaaaagtcaggtaaaccggcatatcacccacaatctgtttcacttgggcgataacgtcatccacgctgcgatcgttcacctggcaggcgtccagcacggtaaagccgttgtctttatcaaactcggtacgaataccaatctgcacggaatgattcgggtcgatcagaccttctttcggcgcggtatagaacatagtgccgtggtcaaattcacaaccgttcgcataggtatcggtgtgggcgtcaaagtgtaccagcgccattttgccgaaatgcttcgcatgagcacgcagcagcggcagcgtaacaaagtggtcaccaccgaaagagagcatacgcttaccggcagccagcagcttctcggcgtgcgcctgcagcttttcgctcatctcacgggcatcgccaaaggcatataccagatcgccgcagtccacgacgttcagacgctcacgcatgtcgaaattccacgggaagcggttgtgttcccaggccagattcgtcgaaacctgacggatcgctgccggaccgtggcgaccacccgcacgaccagaagtggccatatcgaacggcacgccagtaatcacccagtctgcatcgctgtcatacggctggaagttcatcggcaggcgtaaaaaaccaaaggcattggaaaccagtgagttatcgtattgatgacctaaggtgctcatggatggactcctattacaaagtcgatataaaaaaacccttccgcgtcgttaggcccgacgaggaagggttggatttgtcacaataaattgtggcggattatcaccgctaaattaagcggattcaagtaacacaggacttactcatcttcaagataagtataaccgtacaaacctgcctcgaactcttcaaggaactgttgttgcagttcagcatcaagatcggttttcttcacttgatcgcggaactgggttaacagcgttttcggatcgagctgtacatattgcagcatgtccgccacggtatcgccttcgtcagacagttctacttctacgctaccgtcagggaagacgaacacgtcaaccgcttcggtatcaccgaacaggttgtgcatgttgccgaggatctcctgatatgcgccgaccataaagaaaccgagcatcggcggattctctggatcgtactccggcattggcattgtcgtggcaataccgtcaccatcaatatagtggtcgatagcaccgtcagagtcacaggtaatatccagcagcacagcgcgacgttccggcacttgatccagcccttccagcggcagaaccgggaacaactggtcgatcccccatgcgtccggcatcgactggaacagcgagaagttgacgtacattttgtccgccatacgttcctgcagctcgtcgataatcggacgatgagcacggttttgcggatccagctgcttttgcacttcatggcacatgctcaaataaagctgctcagcccatgcacgttcttgcaggctaaagatgccggaagagtagccgatatgaatgtcgtgcagatccatctgactgtcgtgtaaccattcacgcagagaacggcgagttcccggttcgtgcatctcctgccaggtttcccacatgctttgcagcgcgcgcggcgcatcttctgcaggcgcggtcggcaccgtgtattcgttacgttccacgccgatgatattagacaccagcacggtgtgatgcgcagtcaccgcacgacccgattcggtgattaccgtcggatgcggcagaccgttttcttcacacgcatcgccaatcgcccagataatgttgttggcgtattcattgaggccgtagttcaccgaacagtcggactgcgaacgagtaccttcataatccacgcccagaccgccgccgacgtcgaagcactgaatattgacgcccagcttgtgcagttccacatagaaacgcgcggattcacgaacgcctgtcgcgatatcgcgaatattcgccatctgcgaaccgaggtggaagtgcagtagttgcaggctgtcgagacgcccggcttcacgcagggtttcaaccagttgcagtacctgagtcgcagccaggccgaacttcgatttttccccgccggaggactgccatttacccgaaccctgcgaagccagacgtgcacgcacgcccagacgaggaacgacattcagacgttctgcttcatccagcacaatggcgatttctgacatcttctcaatgaccagatagaccttgtgccccatcttctcgccaattaatgccaggcggatatattcgcggtctttataaccgttgcagacgatgacgctacgggtcatgccagcatgtgccagtactgccatcaactcggctttggaaccggcttccagacccagcggttcgcccgaatgaatcagggactcaatcacgcggcggtgctggttaactttgatcggataaacaaggaagtaatcgccgttatagccgtaggattccctcgcacgtttgaacgcggcgttaatggaacgcaaacggtgctgcaggatctgtgggaaacagaacagtgcaggcagacgctggccctgtgcttcacgagttttcactaactgcgcgagatcgacgcgagcttccgggacgtccgggtccgggcacacgctaatgtggcccagctcgttaacgtcatagtagttattgccccaccaggcaatattgtaagtacgcagcatcttgctggcttcctgggagctcattgcaacctcctgcatggagcgtagtacaccgtgttcgcccgctgacgaaggcaaacccatagacatgtcgtcagacatagcgaacctcaaattattttattaagtgtaaaacagttaacgactatcgcagcctggaactgcgataacaacccataagcacatggattttccagcagtgaatgctgacgctccaactgcgcaaccggtttctttttcataacattattaagcacataaccgaacgtaagtgtgaaagttcggcgaaaccacgagaaaactcttgtttttacaagagcgcccttgttcagtcctcagtaactgtaaccagctcttgaatcctgagaagcgccgagatgggtataacatcggcaggtatgcaaagcagagatgcagagtgcggggaacgaatcttcaccagaacggtgagacaggttaagcagcagacaacggttcattatttcgtatcacctccacggccgcctgttaagacgaacccacaagccaaaactctgatttcaacccggctggaagtggcaacacgaaagaaacgtcgtgtgctttttatttaagccgcgcgccgcgttttataccccacaatggcagaaaattgcaaaagataaatacgcagaatgccggcattgtcaggaaaaatttccagccacgtttttaacagaatgagacacgattcaaaaaaaagtggaaatagggtgaagaattgacctaaaatagccatccagatgttaatccatccataccgattaacactcagactgccagtgtttttaacctgcagagtcgtggtaggatccgctaccacagaaaatccacacaacagtttgagctaaccaaattctctttaggtgatattaaatatggcaaaacacctttttacgtccgagtccgtctctgaagggcatcctgacaaaattgctgaccaaatttctgatgccgttttagacgcgatcctcgaacaggatccgaaagcacgcgttgcttgcgaaacctacgtaaaaaccggcatggttttagttggcggcgaaatcaccaccagcgcctgggtagacatcgaagagatcacccgtaacaccgttcgcgaaattggctatgtgcattccgacatgggctttgacgctaactcctgtgcggttctgagcgctatcggcaaacagtctcctgacatcaaccagggcgttgaccgtgccgatccgctggaacagggcgcgggtgaccagggtctgatgtttggctacgcaactaatgaaaccgacgtgctgatgccagcacctatcacctatgcacaccgtctggtacagcgtcaggctgaagtgcgtaaaaacggcactctgccgtggctgcgcccggacgcgaaaagccaggtgacttttcagtatgacgacggcaaaatcgttggtatcgatgctgtcgtgctttccactcagcactctgaagagatcgaccagaaatcgctgcaagaagcggtaatggaagagatcatcaagccaattctgcccgctgaatggctgacttctgccaccaaattcttcatcaacccgaccggtcgtttcgttatcggtggcccaatgggtgactgcggtctgactggtcgtaaaattatcgttgatacctacggcggcatggcgcgtcacggtggcggtgcattctctggtaaagatccatcaaaagtggaccgttccgcagcctacgcagcacgttatgtcgcgaaaaacatcgttgctgctggcctggccgatcgttgtgaaattcaggtttcctacgcaatcggcgtggctgaaccgacctccatcatggtagaaactttcggtactgagaaagtgccttctgaacaactgaccctgctggtacgtgagttcttcgacctgcgcccatacggtctgattcagatgctggatctgctgcacccgatctacaaagaaaccgcagcatacggtcactttggtcgtgaacatttcccgtgggaaaaaaccgacaaagcgcagctgctgcgcgatgctgccggtctgaagtaatctttcttcacctgcgttcaaaggccagcctcgcgctggcctttttcttttggataggcgttcacgccgcatccggcaaaaaaaccgcccgcacaataacatcattcttcctgatcacgtttcaccgcagattatcatcacaactgaaaccgattacaccaaccacaacagacaaagatttgtaatattttcatattattattcggttttcacagttgttacatttcttttcagtaaagtcttaattgcagataacagcgtttaatctatgatgatataactcaattattttcatgcacttaaatcataactaagataaatgttagtgtaagcgattacactgatgtgatttgcttcacatctttttacgtcgtactcacctatcttaattcacaataaaaaataaccatattggagggcatcatgcctgacgctaaaaaacaggggcggtcaaacaaggcaatgacgtttttcgtctgcttccttgccgctctggcgggattactctttggcctggatatcggtgtaattgctggcgcactgccgtttattgcagatgaattccagattacttcgcacacgcaagaatgggtcgtaagctccatgatgttcggtgcggcagtcggtgcggtgggcagcggctggctctcctttaaactcgggcgcaaaaagagcctgatgatcggcgcaattttgtttgttgccggttcgctgttctctgcggctgcgccaaacgttgaagtactgattctttcccgcgttctactggggctggcggtgggtgtggcctcttataccgcaccgctgtacctctctgaaattgcgccggaaaaaattcgtggcagtatgatctcgatgtatcagttgatgatcactatcgggatcctcggtgcttatctttctgataccgccttcagctacaccggtgcatggcgctggatgctgggtgtgattatcatcccggcaattttgctgctgattggtgtcttcttcctgccagacagcccacgttggtttgccgccaaacgccgttttgttgatgccgaacgcgtgctgctacgcctgcgtgacaccagcgcggaagcgaaacgcgaactggatgaaatccgtgaaagtttgcaggttaaacagagtggctgggcgctgtttaaagagaacagcaacttccgccgcgcggtgttccttggcgtactgttgcaggtaatgcagcaattcaccgggatgaacgtcatcatgtattacgcgccgaaaatcttcgaactggcgggttataccaacactaccgagcaaatgtgggggaccgtgattgtcggcctgaccaacgtacttgccacctttatcgcaatcggccttgttgaccgctggggacgtaaaccaacgctaacgctgggcttcctggtgatggctgctggcatgggcgtactcggtacaatgatgcatatcggtattcactctccgtcggcgcagtatttcgccatcgccatgctgctgatgtttattgtcggttttgccatgagtgccggtccgctgatttgggtactgtgctccgaaattcagccgctgaaaggccgcgattttggcatcacctgctccactgccaccaactggattgccaacatgatcgttggcgcaacgttcctgaccatgctcaacacgctgggtaacgccaacaccttctgggtgtatgcggctctgaacgtactgtttatcctgctgacattgtggctggtaccggaaaccaaacacgtttcgctggaacatattgaacgtaatctgatgaaaggtcgtaaactgcgcgaaataggcgctcacgattaatctccccaagcttcctcccatcgcggaggaagccacctcttgcagtcatcttttcttcgctctatcctctgccgctatgaaaacatcccgtctccctatcgccatccaacaggccgttatgcgtcgcctgcgggaaaaactcgcccaggccaacctgaagctagggcgtaactacccggagccaaaactctcttacacccagcgcggaacctccgccggaacggcctggctggaaagctatgaaattcgcctcaatcccgttttgctgttggaaaacagtgaagcttttattgaagaagtggtaccgcacgaactggcacatttgctggtatggaaacatttcggccgcgtagcgccacatggcaaagagtggaagtggatgatggaaaacgtgctgggtgttcccgcccgtcgtacgcatcagttcgaactgcaatccgtgcgtcgcaacaccttcccctaccgctgcaagtgccaggagcatcagcttaccgtacgccgccataatcgcgtagttcgtggcgaggccgtctatcgctgtgttcactgcggtgaacagctggttgcgaaataaccatctgaactatcaggaactttcctgatctggctgattgcataccaaaacagctttcgctacgttgctggctcgttttaacacggagtaagtgatgtaccgttatttgtctattgctgcggtggtactgagcgcagcattttccggcccggcgttggccgaaggtatcaatagtttttctcaggcgaaagccgcggcggtaaaagtccacgctgacgcgcccggtacgttttattgcggatgtaaaattaactggcagggcaaaaaaggcgttgttgatctgcaatcgtgcggctatcaggtgcgcaaaaatgaaaaccgcgccagccgcgtagagtgggaacatgtcgttcccgcctggcagttcggtcaccagcgccagtgctggcaggacggtggacgtaaaaactgcgctaaagatccggtctatcgcaagatggaaagcgatatgcataacctgcagccgtcagtcggtgaggtgaatggcgatcgcggcaactttatgtacagccagtggaatggcggtgaaggccagtacggtcaatgcgccatgaaggtcgatttcaaagaaaaagctgccgaaccaccagcgcgtgcacgcggtgccattgcgcgcacctacttctatatgcgcgaccaatacaacctgacactctctcgccagcaaacgcagctgttcaacgcatggaacaagatgtatccggttaccgactgggagtgcgagcgcgatgaacgcatcgcgaaggtgcagggcaatcataacccgtatgtgcaacgcgcttgccaggcgcgaaagagctaacctacactagcgggattctttttgttaacccctaccccacgcgtacaaccgcgtggggagacgacgcggatttttaactatgcgtatcccccgcatttatcatcctgaaccactgaccagccattctcacatcgcgctttgcgaagatgccgccaaccatatcgggcgcgtactgcgcatggggccggggcaggcgttgcaattgtttgacggtagcaaccaggtctttgacgccgaaattaccagcgccagcaaaaaaagcgtggaagtgaaggtgctggaaggccagatcgacgatcgcgaatctccgctgcatattcacctcggtcaggtgatgtcgcgtggtgaaaaaatggaatttactatccagaaatcgatcgaactcggtgtaagcctcattacgccacttttttctgagcgctgcggcgttaaactggatagtgaacgtctgaacaagaagcttcagcagtggcagaagattgcaattgctgcctgtgagcagtgtggtcgtaaccgggtgccggaaatccgtccagcgatggatctggaagcctggtgtgcagagcaggatgaaggactgaaactgaatcttcacccgcgcgccagtaacagcatcaatacgttgccgttaccggttgaacgcgtccgcctgctgattggcccggaaggcggtttatcggcagatgaaattgccatgactgcccgctatcaatttactgatatcctgttgggacctcgcgttttgcgtacagagacaactgcgctcaccgccattaccgcgctacaagtacgatttggcgatttgggctaacggagaagaataatgatcaagctcggcatcgtgatggaccccatcgcaaacatcaacatcaagaaagattccagttttgctatgttgctggaagcacagcgtcgtggttacgaacttcactatatggagatgggcgatctgtatctgatcaatggtgaagcccgcgcccatacccgcacgctgaacgtgaagcagaactacgaagagtggttttcgttcgtcggtgaacaggatctgccgctggccgatctcgatgtgatcctgatgcgtaaagacccgccgtttgataccgagtttatctacgcgacctatattctggaacgtgccgaagagaaagggacgctgatcgttaacaagccgcagagcctgcgcgactgtaacgagaaactgtttaccgcctggttctctgacttaacgccagaaacgctggttacgcgcaataaagcgcagctaaaagcgttctgggagaaacacagcgacatcattcttaagccgctggacggtatgggcggcgcgtcgattttccgcgtgaaagaaggcgatccaaacctcggcgtgattgccgaaaccctgactgagcatggcactcgctactgcatggcgcaaaattacctgccagccattaaagatggcgacaaacgcgtgctggtggtggatggcgagccggtaccgtactgcctggcgcgtattccgcaggggggcgaaacccgtggcaatctggctgccggtggtcgcggtgaacctcgtccgctgacggaaagtgactggaaaatcgcccgtcagatcgggccgacgctgaaagaaaaagggctgatttttgttggtctggatatcatcggcgaccgtctgactgaaattaacgtcaccagcccaacctgtattcgtgagattgaagcagagtttccggtgtcgatcaccggaatgttaatggatgccatcgaagcacgtttacagcagcagtaacccaccttagcgagaaggatctcgttgagactctgagtgacagcgcccttctttccacgcatactgggcgctgttgcttttttgaaccaggaaacagaacctctgacaatgaatttacagcatcactttcttattgccatgcctgctctccaggatccgattttccgtcgttccgtggtctacatttgcgaacataataccaatggtgcaatggggatcatcgtcaacaagccgctggaaaatctcaaaattgaagggattctggaaaagctgaagatcacgccggagccgcgtgatgaatcaatccgtctggataaaccggttatgctcggcggtccgctggctgaagatcgcgggtttattttgcatactccgccctccaattttgcttccagcattcgcatttcagacaacacggtaatgaccacttcccgcgatgtgctggaaacgctcggcaccgataaacaaccgtctgacgtattggtggctctgggttatgcctcctgggagaaaggtcaactggaacaagaaattctcgataacgcgtggctaacggccccggcagatctgaatattctgttcaaaacgccgattgccgaccgctggcgcgaggcggcaaaactgattggtgtggatattctcaccatgcctggtgtggcaggacacgcctgatgagtggaaccttactcgccttcgacttcggcaccaaaagcattggcgtagcggtcggccaacgcattaccggcaccgctcgccctttgcctgcaattaaagcacaggacggtacgccggactggaacattatcgagcgtttactgaaagagtggcagccggacgaaatcatcgtcggtttgccgctgaatatggacggcaccgagcaaccattgactgccagagcgcgtaaatttgccaaccgtattcatggccgtttcggtgttgaagtaaagctccatgacgagcgtcttagcactgtggaagcccgttccggtctgtttgaacagggcggctatcgggcgctcaacaaaggcaaagttgactctgcctctgcggttattattctcgaaagctatttcgagcagggatattaaggcgatttaaacgcctggcggagtgtaaataatatcatcgcgtcttattgccggatgcggcgtgaacaccttatccagcacacatctggcagcggctataggtctgataagacgcgttag

SEQ ID NO: 27 - protein, 316 aa, Escherichia coli [sequence omitted]

SEQ ID NO: 28 - DNA, 11574 bp, Escherichia coli
ataaccctgattaatgaattattacgtttatcatgttaattcatcattattacatcatcattgtaaataattaaattaacttccataacattaaaatatgtatccactgacgcttttttacataacgaagaattgaccattttgtcctgttgtgccttaatgtaagtaccgtccacagcgtgggacatacttcaaggaaccttttgtgagtcaggcaaccagtatgcgaaaacgacaccgatttaacagtcgcatgacccgtatcgtactgctcatcagctttatcttcttctttggccgttttatctactcgtccgtcggtgcctggcagcaccatcagagcaaaaaagaagctcagcaatccacactctccgtcgaatcaccggtacaacgttagcggttaccttctccactttcacagaacataacggcacttcgctgtcggatgcttttgctgtttgggattatcaaagcggcagatattctttcatcttaaattttacgtctttatcctgactgatgtttatcctgtttggctgcgaaataaatataaaattaatatatatgttgtaatgatatatttttataaattattccctgcgtgaattttaataaatttaatctatccctttatacgcaatacatttactttcctcttttgatgatcttaaatgtcttatttttcgtaatgtgtataacaaggaatagtgatgaaatttaaaaaatgtcttctgcctgtggcaatgttagcgtcattcactctggcaggatgccagtcaaatgctgacgatcatgctgccgatgtttatcaaaccgatcaactgaataccaaacaagaaactaaaaccgttaatattatttccattcttcccgcaaaagttgccgtagacaactcccaaaataaacggaacgcacaagccttcggcgcgcttattggcgcagtcgctggcggtgttatcggccacaacgtcgggtctggcagcaattccggaacgacggcaggtgcagttggcggcggagctgtaggcgcggcagcgggttctatggtgaatgataaaaccttagtggaaggtgtttctttaacctataaggaaggcaccaaagtgtatacctctacccaggtgggtaaagagtgccagtttacgacaggtttagccgttgttattaccacgacgtataacgaaacgcgtattcagccaaataccaaatgtcctgaaaagagctaataatcaggaggagtcatgaagaaagtttttctttgcgccatcttagcctccttaagctatccggctatcgcctcatcattgcaggatcaactctctgctgtcgcagaagcggaacagcaaggtaaaaatgaagagcaaaggcagcatgacgaatgggtcgcggagcgcaacagggaaatccagcaagagaagcaacgtcgcgcaaatgcccaggccgccgctaacaaaagagcggcaacggcagcggcaaataagaaagctcgtcaggataaactggacgccgaagcctctgcggacaaaaaacgcgatcaaagttatgaagatgagctacgcagcttagagattcagaaacaaaaactggcgctggcgaaagaagaagcccgcgttaagcgagaaaacgaatttatcgatcaggaactgaagcacaaagctgcgcaaaccgatgtggtgcaatctgaagctgacgccaacagaaatatgactgaaggcggtcgcgatctgatgaaaagcgtgggcaaagcagaagagaacaaatcggacagctggtttaattaatcgatgttagtaacttcaatcctataattcttgaagataaaaaaccctctgtagtaacagagggttttgttcattcatagtgcagggtcaaatcattcccactcaatggtagctggcggcttgccgctgatgtcatacaccacgcgggaaataccgttcacttcattgataatgcggttggaaacgcgaccgaggaaatcgtacggcagatgcgcccagtgtgcggtcataaagtcgatggtttcgacagcacgcagagagacaacccagtcatacttacgaccatcgcccattacgccaacggaacgtaccggcaggaacacagtgaacgcctggctgactttgtcgtacaggtccgctttacgcagttcttcaatgaagatggcgtcagcacggcgcagcaggtcacagtactctttcttcacttcacccagaacacgaacgccaaggcctggtcccgggaacgggtgacggtacagcatgtcgtacggcaggcccagctccagaccaatcttacgcacttcgtctttgaacagctctttcagcggttcaaccaggcccatcttcatctctttcggcaggccgcccacgttgtggtgagatttgatgacgtgtgctttaccggttgcagacgccgcagattcgataacgtcagggtagatggtgccctgcgccagccacttcacgtcttccagtttcagcgcttcttcatcgaatacttcaacgaaaacgcgaccgatgattttacgttttgcttccggatcgttttcgccagccagcgctgacaggaagcgatcttctgccggtacgtgaacaatgttaagaccaaagtgatcgccaaacatatccagaacctgctctgcttcgttgaggcgcagcaggccgttgtcgacgaatacgcaagtcaggtttttaccgatagcgcggtgcagcagcattgcggttacggaggaatccacaccaccagagaggccgaggatgactttatcgtcgcctacctgctcgcggatgcgagctacagcatcgtcgataattttcgctggcgtccacagggcttcacactggcagatatcacgcacaaaacgctccagcatgcgcataccctggcgggtatgagtcacttccgggtggaactgtacgccatagaagcgtttttcttcgttagccataatggcaaacgggcagctttcggtgctggctacggtgatgaagtcggacggaatagcggtaactttatcgccgtggctcatccagacatcgagcagcggtttaccgtctgcggtcagcgcatcttcgataccgcgaaccagtgcgctgtcgtttacgacttcaacctgcgcgtagccaaattcacgttcgttagaggcttcaacgtgaccgcccaactgcattgccatggtctgcatgccatagcaaacgccgaataccggtacgcctgcttcaaagacatactgcggcgcacgcggactgttttcttcagtagtactttccgggccgccggaaagaataatgccgcttggattgaagtcacgaatttgtgcttctgtcacatcccacgcccacagttcgcagtaaacacccagctcacgcacgcggcgcgcaaccagttgagtgtactgagaaccgaagtccagaatgaggatgcgatgcttatgaatgttttccgtcattgacgcttattccgaggcaagtgaaacagataatataaatcgcccgacatgaagtcgggcgaagagaatcaggagcccagacggtagttcggggactctttagtaatggtcacgtcgtgaacgtggctttcctgaatgcccgcaccgctgatacgtacaaactccgctttagtacgcagttcgtcgatagtaccacagccggtcagacccatacaggagcgcaggccgcccatctgctggtgaatgatctctttcaggcgacctttataggctacgcgaccttcgataccttccggcaccagtttgtcggcagcgttatcgctctggaaataacggtcagaggaacctttggacatcgcgcccagggaacccataccacggtaagatttgtaagaacggccctggtagagttcgatttcacccggagattcttcagtacccgccagcatggaacctaccatcaccgcgcttgcgccagcggcgatagctttggcgatgtcgccggagaagcgaataccgccatcagcgataaccggaataccggtgccttccagggcttctactgcgtcagcaacagcggtaatctgcggaacaccgacgccagtcacgatacgagttgtacagatagagccagggccaatgccgactttaaccgcactgcaaccagcttctgccagagcgcgtgcacctgcagctgttgccacgttgccgccgataatttgcagatccggatatttagcacgggtttcacggatacgttgcagtacaccttctgagtgaccgtgggaggagtcgatcagcagaacgtcaacgcctgcggcaaccagcgcgtcaacacgctcttcgttacccgcacctgcgccaaccgctgcaccaacacgcagacggccttgctcgtctttacaggcgttcggtttacgttccgctttctggaagtctttcacggtgatcatgccgatcaggtggaattcgtcatcaaccaccagcgctttttcaacgcgtttttcgtgcatttttgccagcaccacttcacgggcttcaccttcacgcacggtgaccagacgctctttcggcgtcatgtaaacgctaaccggctggttcaggtcggtaacaaaacgcacgtcacgaccggtgataatacccaccagttcgttttcttcggtaacgaccggatagcccgcaaaaccgttacgctcggtcagttctttcacttcgcgcagcgtcgtggttggcagaacagtctgcggatcagtcaccacaccagattcgtgttttttcacacggcgaacttcttctgcctggcgttcaatggacatgtttttgtggataaagccgataccgccttcctgagccagagcaatagccaggcgcgcttccgttacggtatccattgctgcggaaagcatagggatattcagacgaatagttttcgtcagctgggtgctgaggtcagcagtattcggcagaacggtagagtgagcaggaacgaggagaacgtcgtcaaacgtcagagcttctttagcgatacgtagcatgggcaatatctcgaccagagtggttaataaatattgccgcggcattatacagagcgtaaccgattgcatctacccctttttgcaaaaaatgcttgctatccccgaagggcgggttactatcgactgaataacctgctgatttagaatttgatctcgctcacatgttaccttctcaatcccctgcaatttttaccgttagtcgcctgaatcaaacggttcgtctgctgcttgagcatgagatgggacaggtttggatcagcggcgaaatttctaatttcacgcaaccagcttccggtcactggtactttacactcaaagacgacaccgcccaggtacgctgcgcgatgttccgcaacagcaaccgccgggtgaccttccgcccacagcatgggcaacaagttttagttcgcgccaatattacgctctacgagccgcgcggcgactaccagataatcgttgagagtatgcagccggccggtgaagggctgctgcaacagaagtacgaacagctcaaagcgaagttgcaggctgaaggtttgttcgatcagcaatacaaaaaaccacttccctcccctgcgcattgcgttggtgtgatcacctcaaaaaccggtgctgcgctacatgatattttgcatgtgttaaaacgtcgcgatccttctctgccggtgatcatctaccctgccgccgttcagggcgatgacgcgccggggcaaattgttcgcgccattgaactggcgaatcagcgcaatgagtgcgacgtattgatcgtcgggcgcggcggcggttcgctggaagatttatggagttttaacgacgaacgcgtagcgcgggcgatttttaccagccgcattccggttgtcagcgccgtcgggcatgagacggatgtgaccattgccgattttgttgccgatctgcgtgcgccaacgccgtctgccgccgctgaagtagtgagccgtaatcagcaagagttactgcgccaggtgcaatcgacccgtcaacggctggagatggcgatggattattatctcgccaaccgcacacgtcgctttacgcaaattcatcaccgattacagcaacagcatccgcagctccggctggcacgccagcaaaccatgcttgagcgcctgcaaaagcgaatgagctttgcgctggaaaatcaacttaagcgtaccgggcaacagcagcagcggttaacacagcggctgaatcagcaaaatccacagccgaagattcatcgcgcgcaaacgcgcattcagcaactggaatatcgtttagcagaaaccctgcgcgcacagcttagcgccacgcgtgaacgtttcggtaatgcagtaacgcacctcgaagccgtaagcccactgtcaacgctggcgcgtggatacagcgttactactgctactgacggcaatgtactgaaaaaagtgaagcaagttaaagcgggtgaaatgctaaccacacgtctggaagacggctggatagaaagtgaagtaaaaaacatccagccagtaaaaaaatcgcgtaaaaaggtgcattaagccagcacgaattcaacgcgttttttcgatatcaagccatgcccgtgctgacagaagtaatctactgcaccacaggcttttaacacctgcaacggttgatggcagtctggacaaagagctttcatttcaataaattccccgcaggatcggcaacgcgcatggccgttatcctgatcaagcacatgctgacattgtggacaatgcagttccatatgaattcctccggtagccattccctctacattcatagagggaatggcagataaaatacttacggataattatttatttttcttgatgtgcttcatcagacgcttacgtttacgcatctgggttggcgtcagggtgttacgcttattcgcatacgggttttccccttctttgaactgaatacgaatcggcgatcccattacgtccagcgatttgcggaagtagttcatcaagtagcgcttgtaggaatcaggcaggtctttcacctgattaccgtgaatcaccacaatcggcgggttataaccaccggcgtgggcatatttcagcttcacacgacgaccgcgtaccagcggcggttggtgatcttcaacagccatcgtcatgatgcgcgtcagcatagaggtccccacacgacgggtggagctgtcatacgcttcacgtactgattcaaacaagttaccaacaccactgccgtgcaaggcagagataaagtgcacacgagcaaaatcgataaagcccagacggaagtccagcgtttctttcacctgctctttcacttcctgactcaggccatcccacttattcaccacaatgacaagtgagcgcccactattgagaataaagcccagcagcgagagatcctgatcggaaataccttcgcgcgcatcaatcactaacatcaccacgttggcgtcttcaatggcctgcaacgttttgattacggagaatttctctacagcatcggtgattttgccgcgtttacgtacgccagcggtgtcaatgagcacatactcacgtccatcgcgttccattgggatgtagatgctgtcacgcgtcgtgccaggcatgtcgtaaacaacaacgcgctcttcaccaagaatacggttagtgagtgtagacttacctacgttcggacgacccacaatcgccagtttgatcggcagactttgcgggtcgaagtcgtcttcctcttcttcttcgccgttctcttccgcttcaaattgcgcccagtattcagcgtcttcgtcgacttcctcttgcggtgcgagatcttccatccacggcagcagcacatgctccagcagacttaatacgccacgaccgtgagacgcggcgatcgggtagatttcacctaaaccaagcgagtagaaatcaaccactgcctgatcgggatccagaccgtcagttttgtttgccaccaggaaggtcggtttttcacgggagcgcagatgtttggcaatcgcttcatctgccggcatcaggcccgcgcgcgcatccaccataaacagtacgacgtccgcttcttcaatcgccagcagcgactgttccgccatgcgggtttctacaccgtcttctgtgccatcaatcccgccggtatcaatacagataaactcacggccttcaatttccgcacgaccgtacttacggtcacgagtcagacccgggaaatccgcaaccagcgcatctcgggtgcgagttagacggttaaataacgtggattttcctacgttagggcgcccgacaagcgcgaccacaggtaccatgtttaaagcctcatttttataaatcatcagacaacgcacgctatattcgcgtcgttgttaaaaacaggaaaacggcccctgtccaggagccgttttcaaagtgaacgacagagacgattaacgtgtaatagagtacacggttccgtcttttgcctggatcagcagtttgccgtcagcggcaaccggttcagtctggaaaccggaactatcaactttttgctgggcaacgaaacgaccatcttcgacgttaatccagtgcagataaccttcactgtcaccgaccaccaggttgccattatacagcaccggagaagtcagcaggcgatgcagcagatcgctttgtgtccacagcgtaacgccgccatcaatggtcaacgccatcacccggtcattttgatcgaccagatagatgcgattgccgtcgacgatgaaatcattcaccgaacccagttcgcgtttccacataatctgaccactgcgcagatcaagcgccgtcaggttaccattataggccagcgcgaaaacaacgccgttaacaacgacgggagtcgtgtcaacatcgctcagacggtcaatttcggtagaaccggtcgcctgggaaatacgctgctgccaaatcatctggccctgttccatcagcactgcgctgacgcgaccattatcgccccccacgacggccgcaccaaaagccgttgtcggcgcagactcgccacgcaaagagagcgaaggcatatcgaggttaactgtccatttgacagcgccgtcagcttcgttcagcgcttgtaactgaccgttactggtgtggattaacaccagaccgtcgctgaccaccgggcgcgaaagtgcttcacccgcgactttagtttgccatgccacagtaccatcgctggtattcagcgcgtaaacctgcgccttttcgctgccaatgtagacatgcccaccagacacggtcacaccgccagaaagtaatgcaggctctttagagaaccagccatctttctcggccaggctgacagaccagatttctttgccatcatccgcattcagcgcttttactaaaccagcgcggtccgctgcatagacaacgttgtccgccagtgccggatgaagattggaatagaagttgccaatgccgctaccaacggaagtgctccacgccgtggtcggcgtaaactggttttcaacggttggcaatggggacatctttaccacatcttcttcgctgttaaacagcgaacagccgcttaaaagggtaacggaaagcagtcctggcagcagtaatttacgcaattgcatcgggtccctctcagatggacaaattattaattttcatctgcatcatttcgctcagtgccggagtaacatcgcttttcacgcctgcttcccatgcactacgcgcaccttgcttatcacctttgctcagcaatgcttcaccacgcaggtcggcaacaatggcagcccacccttcacctttgatggtatcaagggttttcagcgcggcatcagcctgcttgagctgtacctgaacgcgagcaagacgcagatttatcacggctttgagattttcatcgctcgtgtctgccagcccctgttgtaactgggcggcagctttctctagttcatttttgtcaacaaattgctgcgcaagttccaaagaagccagcgcaccataagtatttttattttcagcagcaaatttttccgccgccgggatgctatccggtttgccttcgctcactgcggtaaccgcattttgataggcaagagaagcggagcgtgcagaatcaacctgatggctgttccagtagcgccagccaatcagtgcgccaacgcccaaaatcaccccaacagccagtgctttgccattttcagcaaaaaagcgtttaaccgcttctacctggtcgttttcgttctcgtaaatttccacgctgtccttctccttccttaacccagtaacgtgcgcaaatgcgcggctacgctatcctgcgcaactgccgtttgctcaccagagcgcaaatccttcactactgctgtgccgttagccacttcagactcacccagcaccacagcaacgcgggcaccccatttatcagcacgggcaaactgtttcttaaagttgccgccgccgtggttggtcatcaatttcacgcccggtaattcatcacgcagacgctcagctaatgccatagccgcagattgtgtatcagcacctgaagccaccaggtatatatcgacaacaggatcggctttaaattccggattaacggcctgtactaacaatacaagacgttcgaggcccatagcaaaaccgacagccggtgttgcacgaccgcccagttgttccacaagaccgtcataacgaccgcctgcacacacggtgccctgggagccgagactgttagtcacccactcgaaaacggtacggttgtagtaatccagaccacgcaccagacgctggtttacggtgtaagcgatccccgcgctctccagcagtttgcacagaccggcaaaatgctcacgagattcctcgtccagatagtcacctaatgccggagcgtcgttgagaagcgcctgcacttccggattttttgaatccagcacgcgcagcgggttagtgtacatgcggcgtttgcagtcttcgtccagcttttctttatgctgctcaaggaatgccaccagcgcatcgcggtaattggcgcgtgcttccagcgaaccgatagagttcagctcaagagttacgtgctcggaaatacccagcgcgcgccaccagcgggcagtgagcataatcagttcagcgtcgatatccggaccttgcagaccgaaaacttcgcagcccaactgatggaactgacgataacgccctttctgcggacgctcgtgacggaacatcggcccgatataccacagacgctgttcctgattgtacagaagaccatgctcgatgccggcgcgtacacagcccgccgtcccttcagggcgcagagtcaggctgtcgccattgcgatcctcaaaggtgtacatctctttttcaaccacgtcggtgacttcaccaatcgcacgtttgaatagcggggtctgctctacaatcggcaagcggatttcactgtaaccgtagctgccgagcacgtttttcagtgtgccttcaatgcgctgccagatggccgtttcgccaggcaggtaatcgttcatgccgcgaatggcttgaatgttttttgccacgtttattctctttctgaatataaaaatgaaccctcaacgcttccctcaatgtttcgggagccatgcgggttcaatcatacacg

SEQ ID NO: 29 - protein, 488 aa, Escherichia coli
  complement of position 3520-4986 of seq id 28
MLRIAKEALTFDDVLLVPAHSTVLPNTADLSTQLTKTIRLNIPMLSAAMDTVTEARLAIALAQEGGIGFIHKNMSIERQAEEVRRVKKHESGVVTDPQTVLPTTTLREVKELTERNGFAGYPVVTEENELVGIITGRDVRFVTDLNQPVSVYMTPKERLVTVREGEAREVVLAKMHEKRVEKALVVDDEFHLIGMITVKDFQKAERKPNACKDEQGRLRVGAAVGAGAGNEERVDALVAAGVDVLLIDSSHGHSEGVLQRIRETRAKYPDLQIIGGNVATAAGARALAEAGCSAVKVGIGPGSICTTRIVTGVGVPQITAVADAVEALEGTGIPVIADGGIRFSGDIAKAIAAGASAVMVGSMLAGTEESPGEIELYQGRSYKSYRGMGSLGAMSKGSSDRYFQSDNAADKLVPEGIEGRVAYKGRLKEIIHQQMGGLRSCMGLTGCGTIDELRTKAEFVRISGAGIQESHVHDVTITKESPNYRLGS

SEQ ID NO: 30 - DNA, 11204 bp, Escherichia coli
ttgaggcggcgctggctcattcccctcagcccgaagggtagaggggaatgcccgaattaaccgtcagttcgggattatttacgcgttagtttttccagatcggcttcaatctcgctgatcttattggttacgactgactccaggtgacgtaagtcgtcgaggatcttacgcttaagatcaacttcgctgcggtcacgctggcagatttgatcaagctcatcaatgatataccgtagattcgggctgatttcctggacttctttataaccctgacccacaccatcagcgacgaccgttttacgctgacgcggatatttaaacttaacgctcttggcgaaaaactcgcctttgtctttctggaaatagattttcagaatatcgttgttggcttcctgccggaggctgtaacgatcaatttcttcaggattggtaatacccagacttttcagattgtcgtacatagcgttacctcaaaatgagtcagtaaattgtgcttattttagcatttggcctggcccgcccggctcgactgtgatcgcagaaagcctttttcttccagacttctatcatggcgtaaaaatcaaaaaattacctgctttattctggtgataaaattcacgatctacaccagttccagcatcgttacttccgggcggcagttcagacgcaaaccatacaaactgcccacgccacgggttgtgtagatgtgtctttcgccaaaggcatttaatccggcgacgtaacgtttatcttcgacaggggcaaaaggttcaccaaccaacggtacgcgcagttgcccgccgtgagtatggccgcacagcatcagatcccagggttcatcacgcatgacttctttgctgtcgggattatgcgccagcaccagtcttggcagattggcttcgctggcgggaggcggtttgcattgtccggcccataagtcaccagtgcctaccagttcgaattgcctgttcggcgtggcgatcaccgtagcctggttaaacaacaccgtgatgcccgctgatttcaacgtctcgccaattaagtgatttttttctgtaccaacagggcgatcgtggttgccgaagcaggcaaacgtcggcgcacattcggcaaggggggagagtacgtcactaaacgccgaaaaattcagcgacatatcaaataatacgtaatcgccgcccagtaatatcaaatcgggcttttgttctatgccaagagcaatcgcgtcagaaatcaggcttaaaggaacaaaacgagagtaatggagatcggccagaaaaagaattttgaatggtgctgcgttgtctttaaaaaaggcgaggcggtgacggattaattcaaaccagcctggctcacagtaatgcatataaccgaaacctgagctcgtggctatcgtcgcggcagtagcctgcaaaaatcggcggcgtgaaatcatcgctcatccctgcaaaaaaatcgggcagcgtcgtgctgcccgtgtgcatacttttagtcgatggtacgcagcagttcgttaatgccgactttgccgcgagttttcgcgtcaactttcttaacgataaccgcacagtagaggctgtatttgccatcttttgacggcagattacctgaaacaaccacagaccccgccggaacgcgaccgtagtggatttcgccggtttcacggtcgtaaatacgggtgctctgaccaatgtatacgcccatggaaatgacggaaccttcttcgacaatcaccccttcaaccacttcagagcgcgcgccgatgaagcaattatcttcaatgatggttgggttagcctgcagcggttccagcacgccgccgatgcccacgccaccggaaaggtggacgtttttaccaatctgcgcacaagaaccgacggtcgcccaggtatcaaccatggtgccttcatcaacatatgcgccgatgttgacgtaagacggcatcagcacggtgttacgggcaataaacgcaccctgacgtaccgccgctggtggcacaacgcggaagccttctttctggaaacgtgcttcgtcgtagtcggcgaatttcatcggcactttgtcgaagtagcggctttctgccccttcgatcacctgattatcattaatacggaaagagagcagcaccgcttttttcaaccactgatgcgtcacccactgaccgtcaattttttccgctacacgcagtgcgccggaatccagcagggcgatcacctgatttaccgcttcgcgggtaacggtgtctgcattggctggcgtgatctcggcacggcgttcaaaagcggtttcaataatgttctgtaactgctgcattgttaaactcttttcatatcagtaaacacatcaccctttatcgtttggattgagggcctctgtcaaccgctgatgcacttcctgctgcaactcgttattaagcgcacgccggtcagcggtggcaattatgaataaatcttctactcgctcgccaatggttgtaattcgggcaccatgaagcgaaattcccagatcggcaaaaattttcccgactcgcgccagcagtccaggttggtcgagggcgatcagttcgaggaacgatttgcggtcggtatgggtcggcaaaaacgttacttcggtttcaacagtaaaatggcgtaatttggcgggttggcgacggggctgcggtggctgccagctactttgcgtcagtacttgctccagaccaaaccgaataacctcatgacgatctgcggacagcgggttgccatcgggttccagcacgataaaggtatccatcgccataccgtcgcgagtggtgaaaatttgtgcgtcgtgaacacttaaattgcggcggtctaattcggcacagacggcggcaaacagataagggcggtccgggctccagataaaaatctcggtgcctccacgcgtagcctgcgggctaagcaataccagcggtttgcttaaatcatgctgtaataaatggcgggcatgccaggccagttgatttgggctatggcggacaaaatagttagcacgacagcgtgaccaaatttggtgcagcgcctcttcgtcgatgttatccatgcgcagtagtgccagtgcctggagttggtgatggcgaacccgttcgcgcatatccggcgtgttttgcattccgcgtcgtagctgcttttcggtggcaaagtagagctcacgcaacagactttgcttccagctattccacagcgtttcgttggtggcgcaaatgtcagccacagtcaggcataccagatagcgcagacgattttccgtttgcacttcttcggcaaactgcttgatgacttccgggtcctgaatatcgcggcgttgggcggtcaccgacatcaacaggtgctggcgaaccagccaggcgaccagctgtgtttcgcgtgagttcagcccgtggagttcggcaaaatgcactacatcctgagcaccgagaatggagtggtcgccgccgcgtcctttggcgatatcgtgaaacagcgcggcgatgaaaatcagctcagttgacggcaggcgcggccagacgtccacacacaacggatggcgctggcgcgtttcttcactggcaaaactctccagtttcagcatcacgcggatagtatgttcatccaccgtgtaggcgtggaacagatcaaactgcatctgcccgacgatatgcgaccattgcggcatatacgcgccgagcacgctatggcgatgcattggcaatagcccgcgccgcaccgctccggggtgacgcagaatgctcaaaaacagttttcgtgcttccggaatattacacagcggttgttgcagatggcgacgggcatggcgtaactggcgcagcgtggtggagtaaatgccggtgatcgcactgttgtgcaccatggtgtagaacatacgcaagatggcttccggctggcgcataaatagtgtttcatcacgcaggtcgattagcgtaccgcgtagctgaaactcatcgtcgattggacgtggtttttcgtcggcgggaagggcgaggatggcttcatcgaacagttgcagcagcatctggttgagttcactgacgcggcgtgtaacgcggaagtaatccttcatcatccgctcgaccggttcgttaccttcaccactgtaattcagacgctgggcgacgctaagctggcgatcgaataacaggcgattatcgtaacggctgacgaccagatgcagggcaaagcgaatacgccacaatatatgcagacattcgtttaattccgcccgctccgctgaggttaagaagccaaacccgaccatttcatccagcgatgttgcgccaaaatgacggcgggccacccattgcagagtgtggatatcgcgcaagccgccagggctgcttttgatgtctggttcaaggttgtagctggtgccatggtaacgctgatggcgctggttctgttcttcaactttcgccgcgtagaacttgtcggaaggccagaatccttcgctgaaaatatgtttttgcagttcgaggaacagcgcaacatcgccaattaataagcgggattcgattaaattggtggcgacggttaaatccgataacccttccagcatgcactcttcaagcgtgcgcacgctatgaccgacttccagctttacatcccagagcagcgttaacagctcgcccactttttgcgcctgatcgtccgggagctttttacggcttaaaatcagtaaatcgacgtctgaaagtggatgcagctcgccacgaccgtagccaccgacggcgaccaatgccaggtcggcaatctggctgaatcccgcttcaatccataatcgttgcaggagctggtcgataaactcggtgcgcgcctcaatcaactgttctgcagagatcccattgtcaaaggcatcacccagccaacgctggaaagtatcgatatgggcttttatcccaccgacggttaattcatcacggggccagacgcatggattttgcggttgaccgggcagggtggggagagcggtgtttgcgtactgttctggaagggtattcattgtgcgccacccataagattaaattatcgcattaaaaaagccggcattcgccggcttcatcttattcgtcgtgcgagattatcgccgggatggtgtcatccttgcgtagcgtcagaatttcgcagccgttatcagtcaccacaatagtatgctcatattgtgcagacaagctgcgatctttggtttttaccgtccagccatctttcatggtgcggatctcttttttacccgcgttgaccattggctcgatggtgaacgtcatcccaggtttcagtacgacgttggtttcacgggagtcatagtgcagcacctgcggttcttcatggaagccgcgaccaataccgtgtccgcaatattcacgaacgacggagaagccttctgcttcgacaaatttctgaatcgccgcaccgatttcgcgcagattaatgcctggttttaccatgcgtagcgccaggtacaggctttcttgcgtgatgcggcacagacgttcgcccatgatggtcggcttaccgacgataaacattttcgaggtatcgccgtggaaaccatctttgattacggtgacatcaatgttaacgatatcgccatctttcagcagcttagcatcgtccgggataccgtggcacaccacttcattaatagagatgcaaacggatttcggatagccgtgatagccgaggcaggcagaaaccgcgtgttgttcattaacaatgtaatcattacagatgcgatccagctcgccggtgctgacgcccggtttaacatacggttcgatcatctccagcacttcggcagccagtcggccagcgacgcgcattttttcgatatcttctggggtcttgattgagatagccattaattctgtccatcagcgtcggtgataccgacaatatatatgtaagtgccgtcaatggtatcacacccgggcaaattgagaatcattctgaatttcgccaaacgtgccactgaaggttttctataatagaaaattcgacgtctgatgctgtacacagcgccaacaattattggtgtccacgacgtatttgtggtataaagcgcgccggacttccgatccatttcgtatacacagactggacggaagcgacaatctcactttgtgtaacaacacacacgtatcggcacatattccggggtgccctttggggtcggtaatatgggatacgtggaggcataaccccaacttttatatagaggttttaatcatggcaactgtttccatgcgcgacatgctcaaggctggtgttcacttcggtcaccagacccgttactggaacccgaaaatgaagccgttcatcttcggtgcgcgtaacaaagttcacatcatcaaccttgagaaaactgtaccgatgttcaacgaagctctggctgaactgaacaagattgcttctcgcaaaggtaaaatccttttcgttggtactaaacgcgctgcaagcgaagcggtgaaagacgctgctctgagctgcgaccagttcttcgtgaaccatcgctggctgggcggtatgctgactaactggaaaaccgttcgtcagtccatcaaacgtctgaaagacctggaaactcagtctcaggacggtactttcgacaagctgaccaagaaagaagcgctgatgcgcactcgtgagctggagaaactggaaaacagcctgggcggtatcaaagacatgggcggtctgccggacgctctgtttgtaatcgatgctgaccacgaacacattgctatcaaagaagcaaacaacctgggtattccggtatttgctatcgttgataccaactctgatccggacggtgttgacttcgttatcccgggtaacgacgacgcaatccgtgctgtgaccctgtacctgggcgctgttgctgcaaccgtacgtgaaggccgttctcaggatctggcttcccaggcggaagaaagcttcgtagaagctgagtaataaggcttgataactcccccaaaatagttcgagttgcagaaaggcggcaagctcgagaattcccgggagcttacatcagtaagtgaccgggatgagcgagcgaagataacgcatctgcggcgcgaaatatgaagggggagagcccttatagaccaggtagtacacgtttggttagggggcctgcatatggccccctttttcacttttatatctgtgcggtttaatgccgggcagatcacatctccgaggattttagaatggctgaaattaccgcatccctggtaaaagagctgcgtgagcgtactggcgcaggcatgatggattgcaaaaaagcactgactgaagctaacggcgacatcgagctggcaatcgaaaacatgcgtaagtccggtgctattaaagcagcgaaaaaagcaggcaacgttgctgctgacggcgtgatcaaaaccaaaatcgacggcaactacggcatcattctggaagttaactgccagactgacttcgttgcaaaagacgctggtttccaggcgttcgcagacaaagttctggacgcagctgttgctggcaaaatcactgacgttgaagttctgaaagcacagttcgaagaagaacgtgttgcgctggtagcgaaaattggtgaaaacatcaacattcgccgcgttgctgcgctggaaggcgacgttctgggttcttatcagcacggtgcgcgtatcggcgttctggttgctgctaaaggcgctgacgaagagctggttaaacacatcgctatgcacgttgctgcaagcaagccagaattcatcaaaccggaagacgtatccgctgaagtggtagaaaaagaataccaggtacagctggatatcgcgatgcagtctggtaagccgaaagaaatcgcagagaaaatggttgaaggccgcatgaagaaattcaccggcgaagtttctctgaccggtcagccgttcgttatggaaccaagcaaaactgttggtcagctgctgaaagagcataacgctgaagtgactggcttcatccgcttcgaagtgggtgaaggcatcgagaaagttgagactgactttgcagcagaagttgctgcgatgtccaagcagtcttaattatcaaaaaggagccgcctgagggcggcttctttttgtgcccatcttgtaaattcagctaacccttgtggggctgcgctgaaaagcgacgtacaatgtcgctagtattaattcatttcaatcgttgacagtctcaggaaagaaacatggctaccaatgcaaaacccgtctataaacgcattctgcttaagttgagtggcgaagctctgcagggcactgaaggcttcggtattgatgcaagcatactggatcgtatggctcaggaaatcaaagaactggttgaactgggtattcaggttggtgtggtgattggtgggggtaacctgttccgtggcgctggtctggcgaaagcgggtatgaaccgcgttgtgggcgaccacatggggatgctggcgaccgtaatgaacggcctggcaatgcgtgatgcactgcaccgcgcctatgtgaacgctcgtctgatgtccgctattccattgaatggcgtgtgcgacagctacagctgggcagaagctatcagcctgttgcgcaacaaccgtgtggtgatcctctccgccggtacaggtaacccgttctttaccaccgactcagcagcttgcctgcgtggtatcgaaattgaagccgatgtggtgctgaaagcaaccaaagttgacggcgtgtttaccgctgatccggcgaaagatccaaccgcaaccatgtacgagcaactgacttacagcgaagtgctggaaaaagagctgaaagtcatggacctggcggccttcacgctggctcgtgaccataaattaccgattcgtgttttcaatatgaacaaaccgggtgcgctgcgccgtgtggtaatgggtgaaaaagaagggactttaatcacggaataattcccgtgatggataaataagggtaagattccgcgtaagtatcgcgggggcgtaagtctggttataaggcgttattgttgcaggcagtttggtcacggccagcgcgcagcaaccggagcgtacaaaagtacgtgaggatggcgagcactgcccggggccaaaatggcaaataaaatagcctaataatccagacgattacccgtaatatgtttaatcagggctatacttagcacacttccactgtgtgtgactgtctggtctgactgagacaagttttcaaggattcgtaacgtgattagcgatatcagaaaagatgctgaagtacgcatggacaaatgcgtagaagcgttcaaaacccaaatcagcaaaatacgcacgggtcgtgcttctcccagcctgctggatggcattgtcgtggaatattacggcacgccgacgccgctgcgtcagctggcaagcgtaacggtagaagattcccgtacactgaaaatcaacgtgtttgatcgttcaatgtctccggccgttgaaaaagcgattatggcgtccgatcttggcctgaacccgaactctgcgggtagcgacatccgtgttccgctgccgccgctgacggaagaacgtcgtaaagatctgaccaaaatcgttcgtggtgaagcagaacaagcgcgtgttgcagtacgtaacgtgcgtcgtgacgcgaacgacaaagtgaaagcactgttgaaagataaagagatcagcgaagacgacgatcgccgttctcaggacgatgtacagaaactgactgatgctgcaatcaagaaaattgaagcggcgctggcagacaaagaagcagaactgatgcagttctgatttcttgaacgacaaaaacgccgctcagtagatccttgcggatcggctggcggcgttttgctttttattctgtctcaactctggatgtttcatgaagcaactcaccattctgggctcgaccggctcgattggttgcagcacgctggacgtggtgcgccataatcccgaacacttccgcgtagttgcgctggtggcaggcaaaaatgtcactcgcatggtagaacagtgcctggaattctctccccgctatgccgtaatggacgatgaagcgagtgcgaaacttcttaaaacgatgctacagcaacagggtagccgcaccgaagtcttaagtgggcaacaagccgcttgcgatatggcagcgcttgaggatgttgatcaggtgatggcagccattgttggcgctgctgggctgttacctacgcttgctgcgatccgcgcgggtaaaaccattttgctggccaataaagaatcactggttacctgcggacgtctgtttatggacgccgtaaagcagagcaaagcgcaattgttaccggtcgatagcgaacataacgccatttttcagagtttaccgcaacctatccagcataatctgggatacgctgaccttgagcaaaatggcgtggtgtccattttacttaccgggtctggtggccctttccgtgagacgccattgcgcgatttggcaacaatgacgccggatcaagcctgccgtcatccgaactggtcgatggggcgtaaaatttctgtcgattcggctaccatgatgaacaaaggtctggaatacattgaagcgcgttggctgtttaacgccagcgccagccagatggaagtgctgattcacccgcagtcagtgattcactcaatggtgcgctatcaggacggcagtgttctggcgcagctgggggaaccggatatgcgtacgccaattgcccacaccatggcatggccgaatcgcgtgaactctggcgtgaagccgctcgatttttgcaaactaagtgcgttgacatttgccgcaccggattatgatcgttatccatgcctgaaactggcgatggaggcgttcgaacaaggccaggcagcgacgacagcattgaatgccgcaaacgaaatcaccgttgctgcttttcttgcgcaacaaatccgctttacggatatcgctgcgttgaatttatccgtactggaaaaaatggatatgcgcgaaccacaatgtgtggacgatgtgttatctgttgatgcgaacgcgcgtgaagtcgccagaaaagaggtgatgcgtctcgcaagctgaggataatccggctacagagagtcgcgctatttgttagcgtagggcttcagtgatatagtctgcgccatctgatcgtaagtagttggctttataaggtcagatatgccgtggttttacacgg

SEQ ID NO: 31 - protein, 264 aa, Escherichia coli
  complement of position 5078-5872 of seq id 30
MAISIKTPEDIEKMRVAGRLAAEVLEMIEPYVKPGVSTGELDRICNDYIVNEQHAVSACLGYHGYPKSVCISINEVVCHGIPDDAKLLKDGDIVNIDVTVIKDGFHGDTSKMFIVGKPTIMGERLCRITQESLYLALRMVKPGINLREIGAAIQKFVEAEGFSVVREYCGHGIGRGFHEEPQVLHYDSRETNVVLKPGMTFTIEPMVNAGKKEIRTMKDGWTVKTKDRSLSAQYEHTIVVTDNGCEILTLRKDDTIPAIISHDE

SEQ ID NO: 32 - DNA, 14820 bp, Escherichia coli
cactttgttaacaactttaactactctttaatgcagtattaaagattaatcggtaacaaagtgagctgttatgactgataaaaccattgcgttttcgctactcgatctggcccccattcccgaaggttcttcagcgcgagaagcattctcccactctctcgatctcgcccgtctggctgaaaagcgcggctatcatcgctactggctggcagaacaccacaatatgactggcattgccagtgctgccacgtcggtattgatcggctatctggcggcgaataccaccacgctgcatctggggtctggcggcgtgatgttgcctaaccactcaccgttggtcattgcagaacagttcggcacgcttaatacactctatccggggcgaatcgatttggggctgggtcgtgctccgggtagtgaccaacggacaatgatggcgctacgtcgtcatatgagcggcgatattgataatttcccccgcgatgtggcggagctggtggactggtttgacgcccgcgatcccaatccgcatgtgcgcccggtaccaggctatggcgagaaaatccccgtgtggttgttaggctccagcctttacagcgcgcaactggcggcgcagcttggtctgccgtttgcgtttgcctcacacttcgcgccggatatgctgttccaggcgctgcatctttatcgcagcaacttcaaaccgtcagcacggctggaaaaaccatacgcgatggtgtgcatcaatattatcgccgccgacagcaaccgcgacgctgaatttctgtttacctcaatgcagcaagcctttgtgaagctgcgccgtggcgaaaccgggcaactgccgccgccgattcaaaatatggatcagttctggtcaccgtctgagcagtatggcgtgcagcaggcgctgagtatgtcgttggtaggtgataaagcgaaagtgcgtcatggcttgcagtcgatcctgcgcgaaaccgacgccgatgagattatggtcaacgggcagattttcgaccaccaggcgcggctgcattcgtttgagctggcgatggatgttaaggaagagttgttgggatagtgtgtcttaacgcgggaagccttatccgagctggcaacgctgtcctacatagacctgataagcgaagcgcatcaggcattgtgtaggcagcagaaatgtcggataaggcaccgctgattactgatacaccggcagtaaattaaagctcgataaaatatgcaccagtgcgttgccgacgccaaacaccagaatcagcgcaatcatcggcttgccaccccagacgcggaatttcgggctgccaaagcgtttacgcgatgcacgggctaacagcgccggaacaattgccgcccagatggtagccgctaaaccagcataaccaatggcgtacaggaatccgttcgggaacaacagcccccccacaactggcggggcaaaggtcagcaatgccgttttcaagcggcccacagccgagtcgtcgaaaccaaacagatctgccagatagtcaaacaaacccagcgttacgccgaggaacgaactcgctaccgcaaagtttgagaacacgaccagcagcagatccagactacggctgttcagtacgccgcttaacgcctgtaccagcacatcaatattaccgcccttctctgcaataccgataaactccggacgcgggatgttacccatcgtcgccagcaaccagatggtatacagcgccagcgccatcagcgtaccgtacaccagacatttcacgatggttttcggatctttgccgtaatacttcatcaggcttggcacgttaccgtgataaccaaacgatgccagacagaacggcagggtcatcaacagatacggtgcataagacgcattgctttcggcgacgttgaacaatgtcgcaggctgcacatgccccagcaggctaccaaaggtgaggaagaaggtaatgactttcgcccccagcacaatcgctgtcatgcgactgacggctttagtgctcaaccacaccacaaacgctaccagcaatgcaaaaccaaaacccgccgcccgtgccgggacgtttagtgacatctctgcgaaggtgtgatgcagaatcgaaccactggcagaaatataggcataggtcaggatatagagcacaaaggcaatggaaatgccgttgaccacgttccagcctttgcccagcaaatctttggtgatggtgtcaaaactcgaaccgattctgtaattcaggttagcttccagaatcatcaagccggaatgcagcatacagaaccaggtaaagatcagcgccgccattgaccagaaaaaccacgccccggacatgaccactggcagagaaaacatccctgcgccaataatggtgccgccgataatcaccacgccgccaagcagcgacggtgacgtttgggtggtggttagtgttgccatgagggcttctctccagtgaaaaatagtgcgactgcgttgttatgcattgcactgtaccagtacacgagtacaaaagacagaaaaaaagccccgatggtaaaaatcggggctgtatatattattttacagattgtgttcgctgttcagcgatgattacgcatcaccaccgaaacgacgacgaccggtagaatcatcacgacgcggagcgcggccttcacgacgttcgccgctaaaacgacgaccatcaccacggccaccttcacggcgttcaccgctgaagttacgaccgccttcacgacgttcgccaccgaaaccacgaccaccgccacgacgctcaccgccagtatgcggctgtgcatcgcccagtaactgcatgttcatcggcttgttgagaatgcgagtgcgcgtaaagtgttgcagcacttcacccggcatacctttcggcagttcgatggtggagtgagaagcaaacagcttgatgttaccaatgtaacggctgctgatgtcgccttcgttagcaatcgcaccaacgatatgacgaacttcaacaccatcatcgcggcccacttcaatgcggtacagctgcatatcgccaacatcacgacgttcacgacgcggacgatcttcacggtcaccacgcgggccacggtcgttacgatcgcgcggaccacggtcatcacggtcacggaattcacgtttcggacgcatcggcgcatctggcggtacgatcagagtacgttcaccctgtgccattttcagcagtgccgcagccagagtttcgagatccagctcttcaccttcagcagtcggctgaattttgctcagcagtgcgcggtattgatccagatcgctgctttccagctgctgctgtactttagcggcgaatttttccagacggcgtttgcctagcagttctgcgttcggcagttctacttccggaatagtcagcttcatagtacgttcaatgttgcgcagcagacgacgctcgcggttctcaacgaacagcagcgcgcggccagcacgacccgcacgaccggtacgaccgatacggtgaacgtaagactcagaatccatcgggatatcgtagttaactaccaggctgatacgctcaacgtccaggccacgggctgcaacgtcggtcgcaatcaggatgtccagacgaccatctttcaggcgttccagtgtctgttcacgcagcgcctggttcatgtcaccgttcagcgcggcgctgttgtagccgttacgctcaagagcttcagccacttccagagtcgcgtttttggtacgaacgaagataatcgccgcatcaaaatcttccgcttccaggaaacgtaccagtgcttcgtttttgcgcataccccagacagtccagtagctctggctgatgtcaggacgggtagtcacgctggactgaatgcgcacttcctgcggctctttcataaagcggcgggtaatgcgacgaatcgcttccggcatggttgcagagaacagagcggtctgatgaccttccgggatctgcgccataatggtttcaacgtcttcgatgaagcccatgcgcagcatttcgtcagcttcatccagaaccagaccgctcagtttagagaggtccagagtgccacgtttcaggtggtccagcagacggcccggagtaccgacaacgatctgcggcccctgacgcagggcgcgtaattgcacgtcataacgctggccgccgtacagagcaaccacatttacgccgcgcatgtgtttagagaaatccgtcattgcttcagcaacctgtaccgccagttcgcgggtcggtgccagcaccagaatctgtggtgctttcagctcaggatcaagattctgcaacagaggtaaagagaatgctgcagtttttccgctccccgtctgggccatacccagaacgtcgcggccattcagcagatgtggaatacactctgcctgaattggagatggtttttcgtaacccagatcgttaagggcttcaaggataggagccttcaggcccagatctgcaaaagtggtttcgaattcagccatgtagtacgtgtgcctcaaaattaatggcggccagtctacataactcatcatgaaattgatcagcaattttcattgaaaagtgtgaaccggctcaaagtaggtgtattaacgaacaacaacgccctcacccgttaaggtgatggcaatcaaaaaagattacgggctgatgtgtacgtcagctattgctggtccgattctgccaggtcatcttggtcctggcccaggagcgataattccaacaatgcgtatcggtgctcaacaaagttatgaacgttgttggcaaccgccagtttgaacagtgccgtggcgctgtccaaatcccccagacttaggtagtacttacctaaatagaagttggtttcactgagatgctcagcgagcgaggtgttatccgttgcgtccgccttgagcctttccattaacgtttgttcgctaatgttgcccaggtagaactcgacaatgttccatccccactgttccttatccgatttttcgaagtgctgtttcaacacttctttagcctgcttctcatcgagcttctgctcggcgagataaagccacagactacggaaaggatcattgggatcgtcttgataaaacgccagcagatcatcttgcgctaacttgtcacgaccgccgtaatataatgcgatcccgcgattcaagtgcgcgtagttgtaagttggatcaagctcaagtacagaatcaaacgcttcataggcagcatcaaaattgcctgcctgcgttaaatatatgcctaagtaattgaatacttcaggcatatccggtcggattgccagcgcttgcgaaaaatcgttacgcgctaatgccctcagaccgagactatcatacaacactccgcgctcatataaaagctgtgcgcgttcgtcatcggttaaagcccgactggcaaggatttgttccatacgtgccagaatcacttcctgctgtaaagtcggttgcaatggtaccgcgaggacttcacttttacgccaggaagtattactgcatcctgcaagcgtaagtgctgtcgcaacgaaacaccagcgcaaaaaaggcttcatttcccactcccgaagaccacggttgaatgaacgtcctgttcccggttgctaacaaggcgtcctgcccggttaaaagccccccgccgcagcggagggcaaatggcaaccttactcgccctgttcagcagccggagcttccggtgctgcagcaggttgagactgctcagtcgcttctttaatgctcagacggatacggccctggcgatcaacttccagaactttcaccggtacttcctgacccatctgcaggtaatcggtcactttctcaacgcgtttgtcagcgatttgagagatgtggaccagaccttctttaccgccgccgatggcaacaaatgcgccaaagtcaacgatacgggtcactttaccagtgtagacgcggcccacttcgatttctgcagtgatctcttcgatacgacgaatagcatgtttcgctttctcgccgtcggtcgctgcaatcttcacagtaccgtcatcttcgatttcgatggtggtgccagtttcttcggtcagagcacggattacagaaccgcctttaccgataacatctttgatcttgtccgggttgatcttgatggtatggatacgcggtgcgaactcagagatatcgccacgcggcgcgttgatcgcctgttccattacgcccaggatatgcagacgcgcacctttagcctggttcagcgcaacctgcatgatctctttggtgataccttcaattttgatatccatctgcagtgcagagataccgtcgcgggaacctgcaactttgaagtccatatcgcccaggtgatcttcgtcgcccaaaatgtcagacagtacaacgtagttgtcgccttctttcaccagacccattgcgatacccgcaacggcagctttgatcggcacacctgcgtccatcagcgccagagacgcgccgcacacggaagccatagaagaggaaccgttggattcagtgatttcagacacaacacgtacggtgtacgggaatttgtccatatccggcatgactgccagcacgccgcgcttcgccagacgaccgtgaccaatttcacgacgcttcggagaaccgaccatgccggtttcgcctacggagtacggagggaagttgtagtggaacaggaaggtatcggtacgttcgcccatcagttcatcaagaacctgcgcgtcacgagcagtacccagcgttgcggtaaccagcgcctgcgtttcaccacgggtgaacagcgcagaaccgtgagtacgcggcagcacgccagtacgcacatccagaccacggatcatatctttttcacgaccgtcgatacgcggttcgcctgccagtacgcggctacgaacaacgtttttctcgatcgcgtgcagaatttcacccagttcgttttcgtccagggtttcgtcttcagcaagcagcgtcgcgatggtttcagatttgatgacatcaacctgcgcataacgctcttgtttgtcggtgatgcggtaagcatcgctcaggcgagcttcagccagtgcagcaacgcgcgcgtttagcgcttcgtttaccggctccggctgccagtcccaacgcggtttaccggcttctttcaccagttcattgatgttctgaataacaacctgctgttgttcatgaccgaacactactgcgcccagcatctggtcttcgctcagcagttgagcttcagattcaaccatcagtacagcggcttcagtaccggcaacaaccagatccagtttgctctctttcagctcgtcctgagtcgggttcagtacgtactggtcattgatgtaacctacgcgggcagcaccaatcgggccattgaacggaataccagacagagacagcgctgcggaagcaccaatcatcgcgacgatatccgggttaacttgcgggttaacagaaaccacggtggcgataacctgaacttcgttgacgaagccttccgggaacagcgggcgaatcgggcggtcaatcagacgcgcgatcagggtttcgccttcgcttgggcggccttcacgacggaagaagctacccgggatacgaccagcagcgtaggtacgctcctgatagttaacggtcagtgggaagaagtcctgacctggtttggcttttttctggccaacaacggtaacgaataccgcggtgtcatccatgctaaccataacagcggcagtagcctgacgagccatcatgccggtttccagagtcacggtgtgttggccgtactggaatttacgaacgatcggattaagcaatgtaatatcctttctctttcttagacagtaccttacggcactggtgttaatacccgatcttctgcgcatcctcgcgactaatgacaaccctaacccagctctatgtgggtaaagcctctcattagccgcgcgaacctctgcaacggaagatcattcatagcaacaatacattagtttccagtgaattgctgccgtcagcttgaaaaaaggggccactcaggcccccttttctgaaactcgcaagaattagcgacgcagacccaggcgctcgatgagctgggtgtaacgtgctacgtctttacgtttcaggtagtcgagcagtttacgacgctgagaaaccatgcgcagcagaccacgacggctgtggtgatcttttttgtgctctgcaaagtggccctgcaggtggttgatctgtgcagtcagcagtgctacctgaacttcggtagaaccggtgtcgtttgcgtcacgaccaaactcagaaacgattttagctgttgcttcagtacttagagacattttaaaactccaaagtatatagaatgaaaggacgccgatctctaattcagcgatcccagtgtacgttacgcaaagtgttaaacaatttacgcgacgttaagcggcagtattctactcgtagcgacctgttatcgcaagacggttaacattacgccgggtattcaaccaccaggcgacgaggcgcaacgcggccttcatcgtcaatttcgcccataccgataaatttgccgttctcaccttccgtgacgcgaaccagtccttccagtggcgcaccagatgtacgaaccgggttaccatttttgaagtaaacagaagacgttaacggaagattcaccaccggatagtccgaagctggactgtccattggcatcagtaatggatcaagtaactccgcggctggaatatcctgctgttcagcttgctcaacaagttcacgcaggtgctccagggtcaccatccgttcaaccggatatttacttaccgccagacggcgcaggtaaataacatgcgcgccacagccgagtttttcacccaggtcatcaatgatggtgcggatataagtgccttttgagcagtgaatttccagctccagctcattgccttcatggcgaataaacagcaattcataaacggtaatcggacgcgcttcacgcggaacttcaatgccctgacgcgcatattcgtacagttttttgccctgatatttcagtgctgaatacatcgaagggatctgttcgatatcgccacggaaagtatccagtgccgctgccagctgctctgcgctaaaggttaccggacgttcttcaacgatctgtccgtcggcatcagaagtatcggtacgctgtccaagacgcgcaatgacccgatagcgtttgtcggagtccagcagatactgggaaaacttcgtcgcttccccgaggcaaatcggcaacatgccggtcgccagcgggtccagcgcaccggtatgcccggcacggttggcgttatatatacgtttcactttttgcagcgcatcgttgctggacataccctgaggtttatccagcaacaaaacgccgttaatgtcgcgaccgcgacgacgaggacgactcattagtcctccttgctgtcgtccgggttaacacgacgttcttcgtcatgtttgaccacgctggtcaccaggtttgacatgcgcatcccttcaaccagagagttgtcgtagaagaaggtcagttccggcacgatacgcaggcgcatcgctttccccagcaggctgcggatgaaaccagaagcttcttgcaacgctttgatgcccgctttaaccgcgtcttcatctttgtcgttgaggaacgtcacatatactttggcatacgccaggtcgcgagacatttcgacaccggaaacggtggtcatcatgcccaggcgaggatctttaatttcacgctgcaggatgagagcgatctctttttgcatttcctgcgctacgcgctgcgggcgaccaaattctttcgccataataaattctcctgacaaaaaaggggctgttagcccctttttaaaattaatttcaggtggaagggctgttcacgttgacctgataagacgcgccagcgtcacatcaggcaatccatgccggatgcagcgtaaacgccttatcccgcatggaaccctaaaaaccttaagcaatggtacgttggatctcgatgatttcgaatacttcgatcacatcgccagtgcggacgtcgttgtagttcttaacgccgataccacattccataccgttacggacttcgttaacgtcatctttgaagcggcgcagggactccagctcgccttcgtagataaccacgttgtcacgcagaacgcggatcgggttgtgacgtttaaccacaccttcggtaaccatacagcctgcgatggcaccaaatttcggcgatttgaacacgtcacgaacttccgccagaccgataatctgctgtttcagttccggagacagcataccgctcatcgccgctttcacttcgtcaatcaggttatagatgacggagtagtaacgcagatccaggctttccgcttcaatcactttacgtgcagaggcatcagcacgtacgttaaagccaaccaggatggcgttggacgccgcagccagggtggcgtcggtttcggtgataccacctacgccagaaccgatgatcttcactttaacttcgtcagtagacagtttcagcaaggagtcggagatcgcttcgacagaaccctgtacgtctgccttcaggacgatattcacttcgtgaacttcgccttcggtcatgttggcgaacatgttctcgagtttagatttctgctgacgcgccagtttaacttcgcggaatttaccctgacgatagagtgcaacttcacgcgctttcttctcgtcacgtacaacggtaacttcatcacccgcagccggtacgccggacaggccgaggatttccaccggaatggacggacccgcttccagcacttcctgacccagttcgttacgcatcgcacgaacacgaccgtattcgaagccacacagaacgatatcgcccttgtgcagagtaccttcacgtaccagaacggtagcaaccggaccacgacctttatcgaggaaggattcgataaccgcaccgctcgccatacctttacgtaccgctttcagctccagaacttccgcctgcagcaggatagcgtccagcagttcatcgataccggtacccgctttcgcagatacgtgtacgaactggctttcaccgccccactcttccggcaggatgccgtactgggagagttcgttcttaacgcgatccggatcagcttctggtttatcgatcttgttcactgcaaccaccaccggtacctgcgccgctttcgcgtgctggattgcttcgatggtctgcggcatcacaccgtcgtcggcagcaacaaccaggactacgatgtccgttgcctgcgcaccacgagcacgcattgaagtaaacgcggcgtgccccggggtgtccaggaaggtgatcatgccgttttcagtttcaacgtggtatgcaccaatgtgctgggtaatgccgcccgcttcgccagaggccactttcgttgaacgaatgtagtccagcagagaggttttaccgtggtcaacgtgacccatgatggtcacaaccggcgcgcgcggttcagccgcagcacccgtgtcacggtcgctcattaccgcctcttccagctcgttttcacgacgcaggataactttatggcccatctcttcagcaaccagctgtgcggtttcctgatcgataacctggttgatggttgccattgcgcccagtttcatcatcgctttgatgacctgagagcctttaaccgccatcttgttcgccagttcgccaacggtgatagtttcgccgatcacaacgtcacggttaacggcctgagcaggcttctggaagccttgctgcagcgaagaacctttacgttttccgcctttaccgccacgtactgctgcgcgtgcttcttcacgatcagcttttgattcagcgtgtttgttgcctttcttcggacgcgctgctttcgcgttacgaccacggccacggccgccttcgacttcacgatcgctttcgtcttctgcctggcgagcatgttgagaagtagtgacgtgataatcgctggaatcttcagtcggttccgcgttatcagtccatttgttttcttccgccatacgacgtgcttcttcagcaacgcgacgtgcttcttcttcgagtttacgacgcgcttcttcttcagctttacgcttgagctctgcagcttcctgctcacggcgggctttttcagcctgggcgtttttagtcatatcgtcttgttgattgctcactttgtctttttccgcagcttcacgtttcgcttgttcagcagcttcacgcttagcttgttctgcggcctcacgttcagctttttgttgcgcctcgcgtttagccgattcttctgcctcacgacgggcttgctcttccgcttcacgctgcgcttgctcttccgctgcaaggcgttcagcctcttgcggatcgcgtttcacaaaggtgcgtttcttgcggacttcgatttgtaccgatttgctttttccaccggtaccaggaatgttaagggtgctgcgtgttttacgttgcagcgtcaatttgtccgggcctgaatttttctgattcaggtggtcaatcaaagtctgtttctcttgtgcagacacagagtcgtcagcagacttccggatacctgcatcagcaaattgctgtaccaggcgttccacggaggtctgtcgctctgcggccagcgttttaatcgttacatctgtcatgctgttccttcctgctacagtttattacgcttcgtcaccgaaccagcaaatattacgggcagccataatcagtgctccggctttttcgtcggtcaacccttcgatatcagccagatcatcaatgccctgttcggcgagatcttccagcgtacaaacgccacgggcggccagtttgaatgccaaatcacgatctaccccttcaaggttcagcagatcgtcagccggtttgttatcaccgaggctttcttcctgggcctgtgcaatggtggccagtgcatttttagcacgctcgcgcagtgcttcaacggtcggctcatcaaggccttcgatttccaacagctctttcatcggcacataggccaattcttccagcgtcgagaagccttcttctaccagaacagtcgcgaagtcttcgtcgatgtcgagatatttggtgaaggtgtcgatcgctgcgtgcgcttccgcctgatgcttagcctgcaggtcgtcaacggtcatcacgttgagttcccaaccgctcagctgcgaagccagacgcacgttctgaccgttacggccaatcgcctgcgccaggttaccggcttcaacggcgatatccatggtgtgtttatcttcatccaccacgatagaagcaacgtctgccggtgccattgcgttaatcacgaactgcgccgggttatcatcccacaggacgatatcgatacgctcgccacccagttcagtagacaccgcctgaacacgcgcgccacgcatacctacgcaagcacctaccggatcgatacgtttatcgttggttttcaccgcgattttcgcacgagaacccggatcgcgagccgctgctttaatttcaatcacttcttcgccgatttctggcacttcaatacggaacagttcgatcagcatttccggcttggaacgagtgacgaacagttgcgcgccacgcgcttccgggcgaacggaatagagcacgccacgaacgcggtcgccagggcggaagttttcacgcggcagcatatcttcgcgcaggatcacggcttcagcgttgttgcccagatccagagagatgttgtcgcggtttacttttttcaccacgccggtgatgatttcaccttcgtgttcacggaactgatcaaccaccatcgcacgttcggcttcacgcactttctgcacgataacctgttttgccgtctgggtagtgatacggtcaaaggtaacagactcaatctgatcttcaacgtaatcgcccaggttcaggctttcatcttcataacgtgcggcttcaagggtgatttccttggtcggctgggtgacttcatcaacaactaaccagcgacggaaagtgtcaaaatcaccgcttttgcgatcgatctgtacgcggacgtcgatctcttgttcatattttttctttgttgctgtcgccagcgcgctttccaatgcttcgaaaatcttctcgcgaggtagcgccttttcattggatacggcttcaactacagccaaaatttctttgttcatcgcgggcttttcacctcatccagactattaaaagtggggaaccaggttcgccttctggatattactcagcgcgaacacttcatctttaccttcgacggtaactgtgatcatttcaccgtctaccgctttgataacgccctgccatttacgacggttttgtaccgccatacggagaaccagagtcacctcttctccgacaaaacgggcgtagtgttcagccgtgaacagtgggcgatcgagacccggtgaggagacttccaggttataagcaacggtgatgggatcttcaacatccagcacagcacttacctggtggctcacatcagcacaatcatcaacattgatgccatcttcactatcaatatagatgcgcagtgtggatgtgcgaccgcgaataaattcgatgccaaccagttcaaaacccagggcctcaactggcgcagtaatcatctctgttaatttttgctctaatgtggacaagcccacccccaagacataaaaaaagggcctaaagcccagttattctgtagtcagataacaaaaaaccccgataaatcggggctttatataactgaaccctataaccgcaactgcggtctggagcactttccagaaggattttttcaaatcccactacgaaggccgaagtcttcacagtatatttgaaaaag

SEQ ID NO: 33 - protein, 414 aa, Escherichia coli
  complement of position 1196-2440 of seq id 32
MATLTTTQTSPSLLGGVVIIGGTIIGAGMFSLPVVMSGAWFFWSMAALIFTWFCMLHSGLMILEANLNYRIGSSFDTITKDLLGKGWNVVNGISIAFVLYILTYAYISASGSILHHTFAEMSLNVPARAAGFGFALLVAFVVWLSTKAVSRMTAIVLGAKVITFFLTFGSLLGHVQPATLFNVAESNASYAPYLLMTLPFCLASFGYHGNVPSLMKYYGKDPKTIVKCLVYGTLMALALYTIWLLATMGNIPRPEFIGIAEKGGNIDVLVQALSGVLNSRSLDLLLVVFSNFAVASSFLGVTLGLFDYLADLFGFDDSAVGRLKTALLTFAPPVVGGLLFPNGFLYAIGYAGLAATIWAAIVPALLARASRKRFGSPKFRVWGGKPMIALILVFGVGNALVHILSSFNLLPVYQ

SEQ ID NO: 34 - DNA, 10731 bp, Escherichia coli
ctacatccgacaaaacgatgtcaaccatccgaaaccgctctcatccattcgatgagagcggtttttttaattactgcttaaatgcacccgccagagagcgaatatcattgccggttggcgactgatgaagtcgcagaccaaactcttcgacaatcgcaaatatgtgatcgaatatatcagcctgaatgctttcatattccagccacaccacggtgttagtaaacgcgtagatctcgagcggtaaaccgttatcacctggagccagttggcgtaccattaaggtcatatctttacgaatccgcggatggttacgcagatattcgttcagataggcacgaaaggttccaatattggtcattcggcgcagatttaataccgactccgtagaaccttgctggcgattccactcattaatttcctgatggcggctggttaaataaggctttaacaaatgcgctttattcagacgttgcatttcgtcttcatcaagaaaacgaatactggtgacatcaatactgatactgcgcttaatacgtcgcccgccagatgctgacatcccgctccagtttttaaaggagtcagaaaccagagaccaggtgggaatagtggtaatggtattgtcccagttacgcactttgacggtggttaacccaatatcgatcaccgcgccatccgcgccgtatttcggcatctccagccagtcgcccagtttcagcatatcgttcgcggaaagctgaatacctgccaccagaccaagaatcggatctttaaataccaacatcagcacggcagccattgcaccaagaccgctgatcagaatcgctggcgactgaccaatcagcagcgagatcatcaaaatgccgaccagaatcgcgccgatcagtttaatcccctgaaatatccctttcagcggtaactgagatgctgccgggaatttctgcgccagattcaaaataacatccagcaacgagaagactgaaagcagcgcatacatcatgatccacaactgcgcgcaggtagtcagaatatctgccgcttcggtgcctttttgcagccagaataccgcctgaatattgacgataatcccctgcagggtaaaagctaaacggtggaagagtttattctgggtaatgatttgcaaccaaagccgtgaactggcgatggcacgtttttcgaaggtccgcagtaccacccaatgcaaaataatatgcaccacgacggcggtcagaaaaataataccgaaaatcatcaccatcgaggtggtgtgatcgatctcaatacccgctaaatcttcaacctgggatattaaatcctgcataacgtctcctttatacaacagcagcctatgatgacggctgaaacagggttatgcaaatcaggagaatctgagaggaaatagccgggcagatgcccggcaagagagaattacacttcggttaaggtgatgttttgcggcagacgagatttcggcagcgtagcgttaaaatcttcaacgctgtgatgacctaccggaacaaccaccagactggtgtagcctttctctttcagaccaaattctgcatcgaggatggcggcgtcaaaaccttcgatgggtaccgcgtccagacccagagccgccacgccgagcaggaagttaccgacgttgagataaacctgttttgccatccactctgcatcatcatgcagatctttacggtgcatatcagcgaagaacttgcgacctttatcgttcgcggctttcgcttccggcgtggcaaagcggccatcggcatcttcctggtcaacaaccagcttcagccagacatcgtccatcgcggtttttgcacagaacaccacgacgtgcgaggcatcaagcattttacgctcgttgaacacgtaattaccggcagcggatttggcaacacgcgctttaccttcttccgtgctggcaacaataaaatgccacggctgggagttggtgctggatgggctgtattgcagtagcgttttgatctgctcggcctgttccggggtaagttttttgctggcatcaaatgccttagtggaatgacgctttaaggcgacagaaatgatatccataaagactccatgtgaaagtaattttgcgtgccagcagattacaaggttcaacgagaaatggtaagcgagaaaaatgcgctatagatttccgctttagcctggacgcactcttttttgatcgcgtttagccagaccatcaaccaccagattccacgaatcgttgatcagatcgcgaagtaacgcttcggagatttcttcgccgggatacactgaaatccagtgctttttattcatgtgataccctggcttaatgcttgggtatatttgctgatttaacagggatttttgtggatcggacttcagattgataaaggggacgccgcgtagctccgacgacagcataaaaatcttgccgccaattttaaaaacatcgaactccgggccaaaaggccagcaaagctcgacaaagggtaactcaagggccaggcgtttcgccgtttcgtgcagtgattgcttatccataaacgttcctttaggcgaaggagaataagcaaagtatgccgcgaagtacggcgataatcgacgtttaatccgccagcgagaaccagcgtcgccagataaagcgcagaacaaaatactcaatagcgcccagcactaaaaaccacagacaaaacaataaagtgtaaagctgactaagatccatcagatggaacatggtcaccagtttttgtgccagcgccagccccagtgcgggggcgggcagcagcaggcaagagaggaaagccatcagcaaaatgcctgctgcggtggtcaaggtttctaaagggtgtttcataacattgttaaatgtaagttaaaacaccattgtcagggatattcttctgtaaggcaattcccggcttagtcaccggcccagatctcacaatgctttttcaccagcccaatcagcgagccgccatcggcgacgaaatcgcgcattagctgcgcttcattcagaccgctgacgacctggcgatgcagggcctcaatcgcgctcgatgcaccaattttatgtgcggaaggggcgattttttccagcaatcgcaaggtatcttccgttagcggtcgacgatctccagtgtgcggatcggtgatgacgccttcaagcccatagcgacaggcctggaaacggttgaatttatacagcaggtaatctttttcctgatgtttaaacgggcgttccgtcagtaaccagtgggcggtagcctgaattaatcccgccatatttactgcgtggctaagggttaacggggtatccatcacccgaacctccaccgtgccaaaatgaggactggggcgaatatcccagtgcagatctttaatgctgtcgatcatcgtggtgtaactcagacagcgaaacagggcttcaaattgttgccagttactgacccacggcatcgggccattatcaggaaaggcggaaaaaatattcggtcgtgaggaggcaaaacgcgtatccgttccctgcatatatggcgacgcggcggaaagggcgataaagtgcggcacaaatcgtgacaagccgtgcagcaaataaatggcgtcatcgccactggcgcagccaacatggacatgctgaccaaaaacggtcgcctgctgaatgagataaccaaagttttccagcgtgcgttgatagcgttcgttatcgcatacctcctgacgctgccatttctgaaacgggtgcgtgccaccgccgcaaatttccagatgatggtctgtggctgcctgcaatacgactttctgcatcgctgaaaactgcccggcagcctggttgatatcacggcaaacatccgtcgccagctccagcatactttcggtgatatcgtgctttacctctccggccgtgatcttatttttaaccgcgtcaatcagcattgaagagtcctggcttaagtcatagcccggcggattaaccacctgcatttccagttcaataccgagggtaaaaggttcagaaacatgaaaatcgggtaatggcataggtttctcttatgttggcgttttctattcagtatagaagtcggagcggctgggcgagatgcggaagttctggaatgtttcttttttttggtgatggtgaactgatggtgcctgaagcaatttggctacttttgcaatgtgacaagttatggcagtgctgactggtggcgaagaattttgacgattgagtcatgcagaaaaaaacgggttcagcttcagttgattaaatgaggagtgagaagtccgaaacaggactcactgtataaataaacagctattttgttgaggaagggtaagataacggcgggtgcctgaagctttccggtttcaggtttactctgaggtctggaaagatgaagccccaggagatatttctatcaaccctggggctgccactccaaacccgaacaatttggatggtagtcccttcttcgcatggaggcaatataaacatgctgacgaaatatgcccttgcggcagtcatagtgctgtgtttaacggtgctgggatttacgcttctggtcggagactcgctgtgtgagtttacggtgaaggaacgtaatattgagtttaaggctgttctcgcttacgaaccgaagaagtagccgttgtgcggggagtaatcccataagcgctaacttaagggttgtggtattacgcctgatatgatttaacgtgccgatgaattactctcacgataactggtcagcaattctggcccatattggtaagcccgaagaactggatacttcggcacgtaatgccggggctctaacccgccgccgcgaaattcgtgatgctgcaactctgctacgtctggggctggcttacggccccggggggatgtcattacgtgaagtcactgcatgggctcagctccatgacgttgcaacattatctgacgtggctctcctgaagcggctgcggaatgccgccgactggtttggcatacttgccgcacaaacacttgctgtacgcgccgcagttacgggttgtacaagcggaaagagattgcgtcttgtcgatggaacagcaatcagtgcgcccgggggcggcagcgctgaatggcgactacatatgggatatgatcctcatacctgtcagttcactgattttgagctaaccgacagcagagacgctgaacggctggaccgatttgcgcaaacggcagacgagatacgcattgctgaccggggattcggttcgcgtcccgaatgtatccgctcacttgcttttggagaagctgattatatcgtccgggttcactggcgaggattgcgctggttaactgcagaaggaatgcgctttgacatgatgggttttctgcgcgggctggattgcggtaagaacggtgaaaccactgtaatgataggcaattcaggtaataaaaaagccggagctccctttccggcacgtctcattgccgtatcacttcctcccgaaaaagcattaatcagtaaaacccgactgctcagcgagaatcgtcgaaaaggacgagtagttcaggcggaaacgctggaagcagcgggccatgtgctattgctaacatcattaccggaagatgaatattcagcagagcaagtggctgattgttaccgtctgcgatggcaaattgaactggcttttaagcggctcaaaagtttgctgcacctggatgctttgcgtgcaaaggaacctgaactcgcgaaagcgtggatatttgctaatctactcgccgcatttttaattgacgacataatccagccatcgctggatttcccccccagaagtgccggatccgaaaagaagaactaactcgttgtggagaataacaaaaatggtcatctggagcttacaggtggccattcgtgggacagtatccctgacagcctacaaaacgcaattgaagaacgcgaggcatcgtcttaacgaggcaccgaggcgtcgcattcttcagatggttcaacccttaagttagcgcttatgggagtaatccccgcatatccggttgtcaggtcaggatggtaaggcacctgctttacactttcgcccgtggtcagtgatggctgcgggcgaatcgtaccagatgttgtcaattaatcgtgttggcacagcgttatgactatcttttcttttatctgccagtgcacagcaaacatctcattctcacgatgaatgatgacctgctgtttattccagctaattatctgatagtccagaaaacctgcatcagtttggatctcacttgccttaaatgcgctctctttggcggaaaatgccagtgtcagcgccagagaaaaggctaaaccgcagtctgcgagtcgctcgtgttccgctggtgtaataatgttgtctgtcaattctcttgcggtttgtacagaaaaaatttcttctatatcaatgccaatcggttgacgagataccacggctaatgccgtagtcccacagtggctaatactgccgtatacctccgcaggccagacaggttggcgtagctcgccgattgcgggcacacatttatagccatattcccgcaaagcataaacagcagcgatccgtccggctaaatgctctgttttacgtttacgtccagcgtgttgcagttgtgcgtagtgcggcagccagagtaaatcctgctcacaaaaattcgccggatcgaactcaacaaaatgcagcgtatgtccggcaaaggggagggaggtatgcgtagttttcatatcgaccatattcgagactgatgacaaacgcaaaactgcctgatgcgctacgcttatcaggcctacatggtcctgcaatatattgaattggcaagatttttgtaggccggataaggcgttcacgccgcatccggcatgaacgacgcgcactttgtcaacaatctgacgttagcatcagaagtgggtgtttacgctcatataccacgtacgtcccggctcgttataggtatacgccccggcaccggcgatatagttggcccctgccaaatcgcccgtggtctgggcattacccgcacgccacaaacgtttgtcgaacagattgtccacgccgccggtcagactgacattcttcgtcacatcccaggtcgcgctcaggccaacaatgctgtaaggactaatttctttggtttccggtccaaccgctggctgacctttatagttgtacttcttcggctgctgcttgccgtaccaggtgaaggtcgtttgcatcgacaaatcttcccgtgcctgccagctcagcgttgagttcaacgtatactccgggatgatcgacaaacggtcgcccgtggttttgttttcactcttcagcatataagtgatgttattggtccacatcaccgtttcgctaaccggtacgtttaacgatccttccagaccttcaaccaccgctttcggcacgttatcccactgatagagatcggtgccgactgcgttttgccctacagccacatagcccgcttcaatcttattgcgataatcgttacggaaccaggtgacgcccgccagccacccgtcgcgtttgaactccagaccaatctctttgttgatgctggtttctgctttcaggtcatcgttaccttgcagatagcagccgcccgcgctggcatagcaaccctgacctttactgtagagaatgtagttcgggttagtctggtacaggctcggcgctttataagcacgggcgatgcccattttcagcgtgaagtcatcgcctaaaccttgcgatatgttcagcgccgggctccagttattgccgacaatactgtgatgatcgaaacgcagccccggcgttacgatggtgctgtcagtcagctccatgttgttttcggcaaacagcgagaaaatttctgcttttgaatacgggctacggtcggtggtactcacgccatcaatagcgccaccggtattcgttccggtcagtgcctgggtgttggaacttaagtccttcatccgttgctgattccactccgtacccagcgtcagcgtctggttaacgaggaaatcaatcggcaggttaacttcgctgtgcagcatcacgtcatcaagatcgatatcgacgaaatcctgtgtcgctttttcgttaaatttcccttcggtaccgcccgccagaccttccggaatacgcgagttacgggtgtgttcgtactgcacccagttgctggtggtcacgccgttatcccagccaccgttccaggtcagcgcgtagttctggcgatacagacggttggtttcatcgccatatttcgagcgggtataggaatcggagttggtattctgggtgtcgcccgcatacaggttaccctggcggctgtaacctgcttccagttccagcgattgcaatggcgcgaaatcccagcgcaccacgccattaatatctttgttgattaccccttcgcgcccggctggtaacgtcgtggcatacgttccggcacgcgcggactgatggccctggttgatatcccacgcgtcagcctgggttttgtcgaggttgccatacaaacggaagctgaattcgtcgcccagcggaccggtcaggctaaagttagtgcgtttggtggcaccttcctctttatgttctggcgcattgaaatatgcgtcccaggagccgtgccactcgccgctgccttttttggtaatgatgttaaccacgccgcccgccgcgccgttgccataacgcgcagctgccggaccacgcagaacttcaatacgttcaatcatttcaggtggcacccaggaagtatcaccacgggtatcgcgctcgccacgccagccctgacgcaccgagttacggctgcttaccggcttgccgtcaatcaaaatcagcgtgttttccggacccataccgcgaatatcaatctgtcggttattcccacgctgaccactggtggagttaccggtcaggttaacgcctggcatggtacggatgatcttcgacacatcgcgggcaaccgggtttttgcggatttcatctgcggtgatggtcgaaacgccaggcgcctgtaagttctgctcggcggcggtaacgacaatagtatcgtcatgtgaaacaggagtatcggtcggctcttgtgcctgcgctaccccataaatccccagattgaccaacaaggccagggaatgaatcttcttgttcattgttttattcctgcatttttgccacgaattgcaactgtcgggcatggtcgtcatcaacacgacgcatcccgctaccgcgaaaacctttgatcctgaaagacacgcagtgcagttggttaattaatgtccgcgcttcccacggcgcgccattacgctattgcaaatgcaaatagttatcaataatattatcaatatatttctgcaatcaatgaaaaattgcacagtaaacatggggttatggtgtgacggcgttaaaagtaggaagtgagagctggtggcagtcgaaacatggcccggaatggcagcgtctgaatgacgaaatgtttgaggtcactttctggtggcgtgatccccaaggttctgaagaatactcgacgataaagcgcgtatgggtctacatcactggtgtgaccgatcaccatcagaacagccagccccagtcgatgcagcgaattgcaggcactaacgtctggcagtggacgacacaactcaatgccaactggcgcggcagctactgctttattcccaccgaacgcgatgacattttttctgtaccatcccccgatcgcctcgaattgcgcgaaggctggcgaaaactattaccccaggcgatagccgatccgctgaacctacaaagctggaaaggcgggcgagggcacgctgtttctgcactcgaaatgccgcaagcgcctctgcaaccgggatgggattgtccgcaagcgccagaaatacctgccaaagaaattatctggaaaagtgaacggttgaaaaagtcacggcgtgtatggatttttaccaccggcgatgcaacagcagaagaacgcccgctggcagttttgctcgatggcgaattttgggcgcaaagtatgcccgtctggccagtgctgacttcgctgacccatcgtcagcaacttcctcccgccgtgtatgtgttgatcgacgctatcgacaccacgcaccgcgcccacgaactgccgtgtaatgcggatttctggctcgcagtacagcaagagttattacccctggtgaaagctattgccccttttagcgatcgtgccgatcgcaccgtggttgccgggcagagttttggtgggctttccgcgctgtatgccggactgcactggcctgaacgctttggctgtgtattaagccagtcaggatcgtactggtggccgcatcggggcgggcagcaagagggcgtgttacttgaaaagctaaaagctggtgaagttagcgccgaaggtctgcgcattgtgctggaagcgggtattcgcgagccgatgatcatgcgggccaatcaggcgctgtatgcgcaattacaccccataaaagaatccattttctggcgtcaggttgacggcggacatgatgcgctttgttggcgcggtggcttgatgcaggggctaatcgacctctggcaaccacttttccatgacaggagttgaatatggcattcagtaatcccttcgatgatccgcagggagcgttttacatattgcgcaatgcgcaggggcaattcagtctgtggccgcaacaatgcgtcttaccggcaggctgggacattgtgtgtcagccgcagtca

SEQ ID NO: 35 - protein, 217 aa, Escherichia coli
  complement of position 1426-2079  of seq id 34
MDIISVALKRHSTKAFDASKKLTPEQAEQIKTLLQYSPSSTNSQPWHFIVASTEEGKARVAKSAAGNYVFNERKMLDASHVVVFCAKTAMDDVWLKLVVDQEDADGRFATPEAKAANDKGRKFFADMHRKDLHDDAEWMAKQVYLNVGNFLLGVAALGLDAVPIEGFDAAILDAEFGLKEKGYTSLVVVPVGHHSVEDFNATLPKSRLPQNITLTEV

SEQ ID NO: 36 - DNA, 14674 bp, Escherichia coli
  CDS (469)..(2118)
acgggtgggcgcagagcgatacttcgctactattttcacccagaagtgctccaccacttgcgaaacgcccgactgcgaacgcttctggtgacaacccaggggattcagcccctgtagccgatgatgaacgtggccagccgttcaatcacctcggcgatgcaccccctcaggtgttatcacaggactggctcctccaacaccgttacttgggcaacgcgcctcttctggcctgcgctagcgcaggtagtacatttataaataaagggtgagcggggcggttgtcaacgatggggtcatgcggatttttcatccactcctggcggtcagtagttcagctaataaatgcttcactgcgctaagggtttacactcaacattacgctaacggcactaaaaccatcacatttttctgtgactggcgctacaatcttccaaagtcacaattctcaaaatcagaagagtattgctaatgaaaaacatcaatccaacgcagaccgctgcctggcaggcactacagaaacacttcgatgaaatgaaagacgttacgatcgccgatctttttgctaaagacggcgatcgtttttctaagttctccgcaaccttcgacgatcagatgctggtggattactccaaaaaccgcatcactgaagagacgctggcgaaattacaggatctggcgaaagagtgcgatctggcgggcgcgattaagtcgatgttctctggcgagaagatcaaccgcactgaaaaccgcgccgtgctgcacgtagcgctgcgtaaccgtagcaataccccgattttggttgatggcaaagacgtaatgccggaagtcaacgcggtgctggagaagatgaaaaccttctcagaagcgattatttccggtgagtggaaaggttataccggcaaagcaatcactgacgtagtgaacatcgggatcggcggttctgacctcggcccatacatggtgaccgaagctctgcgtccgtacaaaaaccacctgaacatgcactttgtttctaacgtcgatgggactcacatcgcggaagtgctgaaaaaagtaaacccggaaaccacgctgttcttggtagcatctaaaaccttcaccactcaggaaactatgaccaacgcccatagcgcgcgtgactggttcctgaaagcggcaggtgatgaaaaacacgttgcaaaacactttgcggcgctttccaccaatgccaaagccgttggcgagtttggtattgatactgccaacatgttcgagttctgggactgggttggcggccgttactctttgtggtcagcgattggcctgtcgattgttctctccatcggctttgataacttcgttgaactgctttccggcgcacacgcgatggacaagcatttctccaccacgcctgccgagaaaaacctgcctgtactgctggcgctgattggcatctggtacaacaatttctttggtgcggaaactgaagcgattctgccgtatgaccagtatatgcaccgtttcgcggcgtacttccagcagggcaatatggagtccaacggtaagtatgttgaccgtaacggtaacgttgtggattaccagactggcccgattatctggggtgaaccaggcactaacggtcagcacgcgttctaccagctgatccaccagggaaccaaaatggtaccgtgcgatttcatcgctccggctatcacccataacccgctctctgatcatcaccagaaactgctgtctaacttcttcgcccagaccgaagcgctggcgtttggtaaatcccgcgaagtggttgagcaggaatatcgtgatcagggtaaagatccggcaacgcttgactacgtggtgccgttcaaagtattcgaaggtaaccgcccgaccaactccatcctgctgcgtgaaatcactccgttcagcctgggtgcgttgattgcgctgtatgagcacaaaatctttactcagggcgtgatcctgaacatcttcaccttcgaccagtggggcgtggaactgggtaaacagctggcgaaccgtattctgccagagctgaaagatgataaagaaatcagcagccacgatagctcgaccaatggtctgattaaccgctataaagcgtggcgcggttaatcatcgtcgatatgtaggccggataaggcgttcacgccgcatccggcaaccgatgcctgatgcgacgcggtcgcgtcttatcaggcctacaggtcgatgccgatatgtacatcgtattcggcaattaatacatagcacgattgattaaataaccttaataacaatgccgacgttatgtcggcatttttttatcagataaatccccttgtctgtaatttaacggaaatcataccgtgaggttaatcctaaaatagatttttaatcgttgtttatttcggaaaatacgcagattaattgcttttgtttttattttaagtttatgatttttattgttatttaaatataagttgaaacttatatttgatattcattccaattatcctaaaacgccatcgctaattccccgcgccgtaattcgcatgctttagttgtgtatactcgatcccgcccgaaatgtttttgggtaaatctccattcattcaatgaagggaaattgttatgaaaaaagttctgtatggcatttttgccatatctgcgcttgcggcgacttctgcgtgggctgcacctgtacaggtgggcgaagcggcagggtcggcagcaacgtcggtttcggcggggagttcctccgcgaccagcgtcagcaccgtaagctcggcggtgggtgtcgcgcttgcggcaaccggtggcggtgatggttctaataccgggaccaccacaaccacgaccaccagtacccagtaataaagtatgtatccccaaaataattcgagtcattgcatctgtggctagaagtatgaagggattaaccataaccacactccggtgtggttattctgcccctctggagaagagtcgtgaagcgacctgcactcattcttatctgcctgttattacaggcctgttcagccacgactaaagagctgggcaattcactgtgggacagtctgttcggcacgccaggcgtacagctgacggatgatgatattcaaaatatgccctacgccagccagtacatgcagcttaatggcgggccgcagttatttgtggtgctggccttcgctgaagacggacaacaaaaatgggtcactcaggatcaggctactctcgttacccaacatggccgtctggtgaagactctgctcggcggcgacaacctgattgaagtgaataaccttgctgccgacccgctgattaaacccgcacaaatcgttgatggcgcaagctggacgcgcacgatgggctggaccgagtaccagcaggtacgctacgccaccgcacgctcagtcttcaaatgggatggcaccgataccgtcaaagtcggcagcgatgaaaccccggttcgcgtgctggacgaagaagtctccaccgaccaggcgcgctggcataaccgctattggatcgacagcgaagggcaaattcgccagtcggaacagtatctcggcgcggattattttccggtgaaaaccactctcatcaaggcggcaaaacaatgattaaacaaactattgtcgcgttgcttttgagtgtgggagcgtcatcggtcttcgcggcaggaaccgtcaaggtgttcagcaatggcagcagtgaggccaaaacgctaacgggcgcagagcatttaatcgatctggtaggccaaccgcggctggcaaacagctggtggcccggtgcggtgattagcgaagagctggcaacggcggcagcattgcgtcagcagcaggcgttgctgacacggctggcagaacagggcgcagattccagcgccgacgatgccgctgcgattaacgccttacgccagcaaattcaggcgttgaaagtgacgggcaggcaaaaaatcaatcttgatcccgatatcgtccgcgttgccgaacgcggtaacccgccgttgcagggcaactacacgctgtgggtcggaccaccgccgtccacggtcacgttgttcgggcttatcagccgtcctggcaagcagccattcactccaggtcgcgacgtggcgagctatctctctgaccagagcctgctcagcggtgcggatcgcagctacgcgtgggtggtttacccggacggacgcacgcaaaaagcgccggtggcttactggaacaagcgtcacgtagagccgatgcccggcagcattatttatgttggcctcgcggactccgtctggagtgagacgcctgatgcccttaacgccgacattcttcagactctgacgcagcggatacctcaataatgaaaaaaagacatctgcttagcttactggcgctgggcattagcacagcttgctacggcgaaacatatcctgcgcccattggtccgtcgcagtcggatttcggtggcgtaggattattacaaacgcccaccgcgcgtatggcacgggaaggggagttgagtctgaactatcgcgataacgatcagtaccgttattactcagcttcagtgcaactcttcccgtggctggaaacaacgctgcgctacaccgacgtgcgcacccggcagtacagcagcgtcgaagcgttctctggcgatcaaacgtataaagataaagccttcgatctcaaactgcgtttgtgggaagagagttactggctgccgcaagtggcggttggtgcgcgggatatcggcggtacggggctgtttgatgcggaatatcttgttgccagcaaagcctgggggccgttcgattttacgctcggcctgggctgggggtatttgggcaccagcggtaatgtgaaaaatccgctctgttcagccagtgataaatattgctatcgcgataacagctacaaacaggcgggatctatcgacggtagccagatgttccacggtcctgcctcactgtttggcggcgtggaataccagacgccctggcaaccgctgcgcctgaaactggagtatgaaggcaataattatcagcaggattttgccgggaagctggagcaaaaaagtaagtttaacgtcggtgcgatttatcgcgttaccgattgggccgacgttaaccttagctatgaacgtggcaacacctttatgtttggcgttacgttgcgcaccaactttaacgatctgcgcccgtcttacaacgataacgcccgcccgcaatatcaaccgcagccgcaggatgccattttgcagcattcggtggtggcgaatcagttaacgctgttgaaatacaatgccggacttgccgatccacagatccaggcgaaaggcgatacgctgtatgttaccggcgagcaggtgaaatatcgtgattcgcgcgaagggatcatccgtgcgaatcggatcgtgatgaacgatctgccggatgggatcaaaacgatccgcattacggaaaatcgccttaacatgccgcaggtgacgacggaaaccgatgtcgccagcctgaaaaatcatctcgccggagagccgttgggccacgaaacgacgctggcgcaaaaacgcgtcgagccagtggttccgcagtccaccgagcagggctggtatatcgacaaatcacgctttgatttccatatcgatccggtgctgaaccagtcggtcggtggcccggaaaacttttacatgtatcagctgggcgtgatgggaacggcagatttgtggctgacggaccatctgctgaccaccggcagcctgtttgcaaatcttgccaacaactacgacaagtttaactacactaatcctccgcaggactcgcacttaccgcgcgtgcgtacccatgtgcgcgagtatgtgcagaacgatgtctatgtgaataacctgcaagccaactacttccagcatctgggcaacggcttctacggtcaggtctacggtggttatctcgaaaccatgtttggcggtgcgggggcagaagtgttgtatcgcccgctggacagcaactgggcgtttggtctggatgccaactacgttaaacagcgcgactggcgtagtgcaaaagatatgatgaaattcaccgactacagcgtgaaaaccggacatctgaccgcctactggacgccatctttcgctcaggatgtgttagttaaagccagcgtcgggcagtatctggcaggggataaaggcggcacgctggagatcgccaaacgctttgatagcggcgtggtggtgggtggctatgccacgatcactaatgtttcgaaagaggagtacggcgaaggggacttcaccaaaggcgtgtatgtctcggtaccgttggatctcttctcgtctggcccgacacgcagccgtgcggcgattggctggacgccgctgacgcgtgacggtggtcagcaacttgggcgtaagttccagttgtatgacatgaccagcgaccgtagcgtcaatttccgctaagtcatgggaaaggtgccagttttcgcactcactggcaccttcattcttaatggcctgtcgagccatcaggaacgcagttcactcccggtttgcgatctggtgtgtaaaggcgaaaacattctgtcttcctgtccgtcgatatcggttgcaggtctggttgcctgagcgactgggccatcattgggctggagacattgctttgcggtaggtcggctttatcagcagtaccgagcggaccagcataagcaggaagaacagagactgataacatcaaagcagcaaaataaggcttcatttttaccacctttatcaggttacgtttcatttgttccagaggaacattgtcgatttttcgcgcattgctggtggctgggaatcacctgaatgggtgatttttgaattaccggctttggtgcggtttgtcttgccggatgcgccgccaggcgcggcttatccggcctacgggtaggtatatccggctttggtggaggcgcgctccaaatccaggttgaacaaaacatacacaaaaaatatagatctccgtcacatttttgcgttatacaggaagctcgccactgtgaaggaggtactgctatgacgtcactctctcgtccgcgcgtggagtttatctccaccattttgcagaccgtactcaatcttggcctgctgtgcctcggcctgattttggttgtcttcctcggcaaagaaacggtgcatctggctgatgtgctgttcgcgccagaacaaaccagcaaatatgagctggtagaaggactggtggtttactttctctatttcgaatttatcgcgctgattgtgaagtactttcagtccggttttcacttcccgctacgttactttgtctatattgggatcaccgccattgtgcgcttgatcatcgtcgatcataaatcgccactggatgtgttgatctactcggctgcgatcctgttactggtgatcaccctgtggctgtgtaattcgaaacggctgaagcgggagtaaaaagtcagcacgccgaaatggcgcggcgtgctggacaggaagattacagcgtagcagtttgttgtgttttcttcgtttccggttcccagagcgcttccagctcctcaagggttttacctttggtttccgggacaaatttccacataaacagtgctgccagaacgcccatacaaccgtaaatccagtaggagaaaccgttgtggaaatgggccaccagccaggagtttttgtccatcatcgggaaggtccaggagacgaagtagttcgccagccactgggccgccaccgcgattgccagcgctttaccacgaatagcattcgggaagatttccgacagcagtacccagcataccggaccccaggacatggcaaaggcggcaacatagaacagcatcgacagtagcgccacaatacccggtgcctgagtgtaaaacgcggtaccgaggctaaacataccgattgccattccgagtgcgccgataatttgcagtggcttacgaccaaatttatccaccgtcataattgccagaacggtgaaggtgaggttgataactccgacaataatggtctgcaacagcgcgatatccgtgctggcccccagcgttttgaacacttccggcgcgtagtacagcaccacattgatgccgacaaattgctggaagatggagagcattacgccgattacaatcacgcccacgccaaacatcagcagacgaccaccggttttgcggccatgatccagggagtgtttaatttcctgtactgcctgagttgcaagcgtgttgcccataattttgcgcaggataccttccgcctgttcttgcttgccgcgcgacatcagccagcgaggactttctggcacggtatacagcagcattaagaacagcagtgcagggatacattccgaggcaaacatataacgccagccgtcagtattcagccagctggcatcaccggaacgggcaataaaatagtttacgcagtaaactaaaagttgcccgaaaataatcgcaaactggttaaaagagaccagtttcccgcgaatatgagctggagccagttccgcaatatacattggcgagagcattgaggctaaaccaacgccaataccgccaataatgcgataaataacaaattccgggacataacctgccagataaacaggcacagtgttgtccgggtttatagaggtaaaaccaagttctggccaggcagaacctacaccagaaataaaaaacaggacagcagcaatcttaagtgaatcacgacgaccgaagcggttactgcaataaccaccgagggcaccgccgatgatgcaaccaatcagagcgctggccacgcaaaaccctaacagggagttggcagcggattcacttaagttttgtggagcaacaaagacggtattgagtgactcaacagtaccggaaataacggcggtgtcgtagccaaataataaaccacctaatgtagcgactaaggtaatcgaaaatatataactggaattatactgggtattcattcagacctgccttagaccattctgatcttttatcagtgcattgatgttggaattgtcaggcagttaaggcaattatcattttttacaatgcgtttacgtaatgtcttttctgtgatcttaattgtgataattatccaaaattgataaaaacaatactattgccgtgactcagagcacgaaagagaattatcgtaagtgggaaaacaaataacgtaaaaataataagctctatgatggaaatattaaccggcgaacgattcagattgcagacgaaagaaaaaaaggcgctccgtggagcgccgaataacagtcacaagttgggataacgtaagttgagggtgcagcggcataacattggcagaacaacatctttaacctttcacaccacctgccgtcaggccgttgaccagccagcgttgagccagcaagaagacgatggtgatcggtaatgcagacatcacggcagcggcggcaaagtcaccccacaggtagttttgcgggttgaggtattgctgcatccccacggccagggtgtagctgtttacgtcacgcagtaacagcgacgcgaccggaacttcagtaatggcagcgataaacgacaggatgaataccaccgccagaatcggtactgacagcggcaacaggacaaggcggaaggcctgccacggtgtcgcaccatccagcgcagcagcttcttccagcgaactgtcgatggtttcgaaatagcctttgatggtccagacatgcagcgcaatcccacccagatacgcgaaaattacgccgccgtgagtattcaggccaatgaatggaatgtactcacccagacgatcaaacaacgcatacaacgcgaccagtgaaagtactgccgggaacatctggaaaatcagcattcctttcagcagcgtcgctttgcctggaaagcgcatacgggcgaaagcgtaggcgcaggtggtggagagcgccacaatgccaatcgcggaaatcccggcgacctttaccgagttccacagccacagcagtaccgggaatggcggtggcgtaatgcgaccatcagcctgttcaacgctaaaacctaacgccagtttccagtgatcccaggagatttgctccgggatcaggctgccggtcgcaaagtttccctgacgcagcgagatagcgacgaccatcagcagcgggaacataatcgctgcgataaaaagtagcagtagcaggtgagtaataaataaacgagctttttgcgatttcggttggaccattgccatttttgttatctcccttaatcaaacttcattcgcgtggctttcaggttcactatcgccagcgcacccaccagcaggaagatcagcgtggcaattgctgccgccagaccgaagtcctgacccccgccgccttcaaaagcgatgcggtaggtgtagttaacaagcaggtcggtataaccggctggcgtggtcgtgccaagacgatccgggccgccgttggttaacagttgaatcagcacgaagttgttaaagttaaaggcgaagctggcgatcatcagcggcgtcagcggtttaatcagcagcggcagcgtaatcttaaagaagttctggaacggacctgcgccatccattgctgaggcttcatacaaatcgtccggaatcgctttcagcaagcccatgcagaggatcatcatgtacggataacccagccaggtattgacgataattagcatcgtgcgggcggtggtcggatcgctgaaccaggcgggcttcacgccaaacagcgcgctcaacatcatgttgatttcaccgaagctctggttaaacaaccctttgaaaatcaagattgaaatgaacgatggcaccgcgtagggcagaatcagcaggacgcgatagaccgctttgccgcgcaacgcttcccactgcaccagacacgccagaaccatgccgaccgccaccgttaaaaagacagtgatcagcgagaacaccacggtccagacgaaaatggcgaggaacggtttctgaatgccttcgtcggtaaagacgcgggtaaagtttttccagccggtggtcacggtgtaaccggggcttagcttttcatcaccccagttgccgtcggcggtaatggactggtaaaagccaatttggttattcggacgatatttcacgccgctctgattattcgtcaacgtgccgtcaccgtcgagtgtgtagagcggctgcgtgccagaaaactggcgcagggagctcatcatcactttgttgccatccggcagaatggcggtaatgtcactcagcgcctgacgattctgggtaatcacgcgcagattcgcgcgttcgccttcgggctgggcggtcgtttctttcagttgcagtttttgctcgccgccaaatttaaaagcgtcggagaggtaatttttgccggtttcgccgtcgctgagcgccagttgccactcatcgcccgccgggtaaagaccaaagttataggttttgcctgcttgccaggagcgatctaacaacacttcctgcgcacgttcaaaagtcagctggttagtgctgctgtagttggtgaaggcaatggcgatggtgcagaccagagggaagaggacgaataatcccattccagccattcccgggtaaacatagcgccaggcgtaggctttacgattggcgaaaatatacagccccgctgaactcaatatcagcgtggtaatggcgaacaggtattccccttgtgcgtacattaaaacaacaaggtaacccaccagcaggccgagcagacctagcactgaccatttcagcgcgtcgctttgccaccaatgtttctttttaatgacatccatggggttcttcctcattccaggacggataaggctttcacgccttatccgacaacaactgcctgatgcgacgctgacgcgtcttatcaggcctacatacgtttcggttttgtaggccggacaaggcgttcacgccgcatccggcatttcacagcattacttggtgatacgagtctgcgcgtctttcagggcttcatcgacagtctgacgaccgctggcggcgttgatcaccgcagtacgcacggcataccagaaagcggacatctgcgggatgttcggcatgatttcacctttctgggcgttttccatggtggcggcaatacgtggatctttcgccaactcttcctcgtaagacttcagcgctacggcacccagcggtttgtctttattaaccgcttccagaccttcatcagtcagcagatagttttcgaggaactctttcgccagctctttgttcggactggcggcgttaatacctgcgctcagcacgccaacgaacggtttggatggttgacccttgaaggtcggcagtaccgttacaccataattcactttgctggtgtcgatgttggaccatgcccacgggccgttgatggtcatcgctgtttcgcctttattaaaggcagcttctgcgatggagtaatcggtgtctgcattcatgtgtttgtttttaatcaggtcaaccaggaaggtcagacccgctttcgcgccagcgttatccacgcccacgtctttaatgtcgtacttgccgttttcatacttgaacgcataacccccgtcagcagcaatcagcggccaggtgaagtacggttcttgcaggttgaacatcagcgcgctcttacctttcgctttcagttctttatccagcgccgggatctcttcccaggtttttggcgggttcggcagcagatctttgttataaatcagcgataacgcttcaacagcgatcgggtaagcaatcagcttgccgttgtaacgtacggcatcccaggtaaacggatacagcttgtcctggaacgctttgtccggggtgatttcagccaacaggccagattgagcgtagccaccaaagcggtcgtgtgcccagaagataatgtcagggccatcgccagttgccgcaacctgtgggaatttctcttccagtttatccggatgctcaacggtgactttaattccggtatctttctcgaatttcttaccgacttcagcgagaccgttatagcctttatcgccgttaatccagattaccagtttaccttcttcgattttggcgagagccgaggcggaaaacatcatcgtcgttaatgcggataatgcgaggatgcgtgcacctgtttttattttcataatctatggtccttgttggtgaagtgctcgtgaaaacacctaaacggactctagtttctttatacggcaacctctttccatcctccttgcccctacgccccaccgtcgctttgtgtgatctctgttacagaattggcggtaatgtggagatgcgcacataaaatcgccacgatttttgcaagcaacatcacgaaattccttacatgacctcggtttagttcacagaagccgtgttctcatcctcccgcctcctcccccataaaaaagccagggggtggaggatttaagccatctcctgatgacgcatagtcagcccatcatgaatgttgctgtcgatgacaggttgttacaaagggagaagggcatggcgagcgtacagctgcaaaatgtaacgaaagcctggggcgaggtcgtggtatcgaaagatatcaatctcgatatccatgaaggtgaattcgtggtgtttgtcggaccgtctggctgcggtaaatcgactttactgcgcatgattgccgggcttgagacgatcaccagcggcgacctgttcatcggtgagaaacggatgaatgacactccgccagcagaacgcggcgttggtatggtgtttcagtcttacgcgctctatccccacctgtcagtagcagaaaacatgtcatttggcctgaaactggctggcgcaaaaaaagaggtgattaaccaacgcgttaaccaggtggcggaagtgctacaactggcgcatttgctggatcgcaaaccgaaagcgctctccggtggtcagcgtcagcgtgtggcgattggccgtacgctggtggccgagccaagcgtatttttgctcgatgaaccgctctccaacctcgatgctgcactgcgtgtgcaaatgcgtatcgaaatctcccgtctgcataaacgcctgggccgcacaatgatttacgtcacccacgatcaggtcgaagcgatgacgctggccgacaaaatcgtggtgctggacgccggtcgcgtggcgcaggttgggaaaccgctggagctgtaccactatccggcagaccgttttgtcgccggatttatcggttcgccaaagatgaacttcctgccggtaaaagtgaccgccaccgcaatcgatcaagtgcaggtggagctgccgatgccaaatcgtcagcaagtctggctgccagttgaaagccgtgatgtccaggttggagccaatatgtcgctgggtattcgcccggaacatctactgccgagtgatatcgctgacgtcatccttgagggtgaagttcaggtcgtcgagcaactcggcaacgaaactcaaatccatatccagatcccttccattcgtcaaaacctggtgtaccgccagaacgacgtggtgttggtagaagaaggtgccacattcgctatcggcctgccgccagagcgttgccatctgttccgtgaggatggcactgcatgtcgtcgactgcataaggagccgggcgtttaagcaccccacaaaacacacaaagcctgtcacaggtgatgtgaaaaaagaaaagcaatgactcagg

SEQ ID NO: 37 - protein, 549 aa, Escherichia coli
MKNINPTQTAAWQALQKHFDEMKDVTIADLFAKDGDRFSKFSATFDDQMLVDYSKNRITEETLAKLQDLAKECDLAGAIKSMFSGEKINRTENRAVLHVALRNRSNTPILVDGKDVMPEVNAVLEKMKTFSEAIISGEWKGYTGKAITDVVNIGIGGSDLGPYMVTEALRPYKNHLNMHFVSNVDGTHIAEVLKKVNPETTLFLVASKTFTTQETMTNAHSARDWFLKAAGDEKHVAKHFAALSTNAKAVGEFGIDTANMFEFWDWVGGRYSLWSAIGLSIVLSIGFDNFVELLSGAHAMDKHFSTTPAEKNLPVLLALIGIWYNNFFGAETEAILPYDQYMHRFAAYFQQGNMESNGKYVDRNGNVVDYQTGPIIWGEPGTNGQHAFYQLIHQGTKMVPCDFIAPAITHNPLSDHHQKLLSNFFAQTEALAFGKSREVVEQEYRDQGKDPATLDYVVPFKVFEGNRPTNSILLREITPFSLGALIALYEHKIFTQGVILNIFTFDQWGVELGKQLANRILPELKDDKEISSHDSSTNGLINRYKAWRG

SEQ ID NO: 38 - DNA, 11692 bp, Escherichia coli
  CDS (529)..(1632)
aaagcgttgcgcctttgttgtatcgtcagttcagggtaaaatagatttccgttaaccacctggtcaggacgccgtatgcattgcccattctgtttcgccgtggacactaaggtaattgactctcgtctcgtgggcgagggttcatccgtacgccgccgtcggcagtgtctggtgtgtaatgaacgtttcaccacctttgaagtggcggagctggttatgccgcgtgttgtaaaaagcaacgacgtgcgtgaaccgtttaatgaagagaaattgcgtagcggaatgctgcgggcgctggaaaaacgtccggtgagttccgatgacgtcgaaatggcaatcaatcatattaaatcgcagctgcgcgccaccggtgagcgcgaagtgccgagcaagatgattggcaatctggtgatggagcaattgaaaaagctcgataaagtcgcctatatccgttttgcctctgtctaccgcagtttcgaagatatcaaagaatttggcgaagagatcgcgcgcctggaggactaagccgtgcaggacgagtattacatggcgcgggcgctaaagctggcgcaacgaggacgttttaccacgcatcccaacccgaatgtcgggtgcgtcattgtcaaagatggcgaaattgtcggtgaaggttaccaccaacgtgcgggtgaaccacatgccgaagtacacgcgttgcgtatggcgggtgaaaaagccaaaggtgcgaccgcctatgtcacactcgaaccctgtagccatcatggtcgtacgccaccgtgctgtgacgcactcatcgccgctggcgtagcgcgcgtggttgcctcgatgcaagatcctaacccgcaggtcgctgggcgtggactttaccgtctgcaacaggctggcattgacgtcagccacggcctgatgatgagtgaagccgagcaattgaataaaggctttctcaagcggatgcgcaccggctttccttatattcagttaaaacttggcgcatcgcttgatggtcgcacggcgatggcgagcggcgaaagccagtggatcacttcgccccaggcgcggcgtgatgtacaactactgcgcgcgcaaagtcatgccattttaaccagcagcgccacggtgctggcggatgatcctgccttaacggtgcgttggtctgaactggatgaacaaactcaggcgctctatccgcaacaaaatctccgtcagccgatacgtattgtgattgatagccaaaatcgcgtgacgccggtacatcgcattgtgcagcagcccggcgaaacctggttcgcgcgtacgcaggaagattctcgtgagtggccggaaacggtgcgtaccttgctgattccagagcataaaggtcatctggatctggttgtactgatgatgcaactgggtaaacagcaaattaacagcatctgggtggaagcggggccaacgctcgctggcgcattgctgcaggcgggtttagtcgatgagctgattgtctatatcgcacctaaactattaggcagcgacgcccgcggattatgcacgctgccagggcttgagaaattagccgacgccccccaatttaaattcaaagagatacgtcatgtaggcccggatgtttgcctgcatttagtgggtgcatgatctcccggctcgaaagggaagcagcgcacgaaatattatgctaaaatccgcccccctgcggggccatactcgaacccgaaggaagaaaatgaacattattgaagctaacgttgctaccccggacgctcgcgtcgccatcaccatcgcgcgtttcaacaactttatcaatgacagcctgctggaaggtgcaattgacgcactgaaacgtatcggtcaggtaaaagatgaaaacattaccgttgtttgggtgcctggtgcctatgagctgccgctggcggcgggtgcactggctaaaaccggtaaatacgacgcggtgattgcgctgggtacggttattcgtggtggcactgcccactttgaatatgtcgctggtggtgcaagcaacggcctggcgcatgttgcccaggacagcgaaattccggttgcttttggggttctgaccactgaaagcattgaacaagcgatcgaacgtgctggcaccaaagctggcaacaaaggtgcagaagctgcactgaccgcgcttgaaatgattaatgtattgaaagccatcaaggcctgaaattagtaaggggaaatccgtgaaacctgctgctcgtcgccgcgctcgtgagtgtgccgtccaggcgctctactcctggcagttgtcccagaacgacatcgctgatgttgaataccagttcctggctgaacaggatgtaaaagacgttgacgtcctgtacttccgtgagctgctggccggggtggcgactaataccgcatacctcgacggactgatgaagccatacctgtcccgcctgctggaagaactgggacaggtagaaaaagcagtactgcgcattgcgctgtacgaactgtctaaacgtagcgatgtgccatacaaagtggccattaacgaagcgatcgaactggcgaaatcgttcggcgcagaagacagccataagttcgtcaacggcgtactcgataaagcagcacctgtgattcgccctaacaaaaagtgatatccaggccggtagattcacggaagaccgttccatgatcgccggccttttcttttttacctgctgaggcataacgtatggcatgtggcgagttctccctgattgcccgttattttgaccgtgtaagaagttctcgtcttgatgtcgaactgggcatcggcgacgattgcgcacttctcaatatccccgagaaacagaccctggcgatcagcactgatacgctggtggcgggtaaccatttcctccctgatatcgatcctgctgatctggcttataaagcactggcggtgaacctaagcgatctggcagcgatgggggccgatccggcctggctgacgctggcattaaccttaccggacgtagacgaagcgtggcttgagtccttcagcgacagtttgtttgatcttctcaattattacgatatgcaactcattggcggcgataccacgcgtgggccattatcaatgacgttgggtatccacggctttgttccgatgggacgagccttaacgcgctctggggcgaaaccgggtgactggatctatgtgaccggtacaccgggcgatagcgccgccgggctggcgattttgcaaaaccgtttgcaggttgccgatgctaaagatgcggactacttgatcaaacgtcatctccgtccatcgccgcgtattttacaggggcaggcactgcgcgatctggcaaattcagccatcgatctctctgacggtttgatttccgatctcgggcatatcgtgaaagccagcgactgcggcgcacgtattgacctggcattgctgccgttttctgatgcgctttctcgccatgttgaaccggaacaggcgctgcgctgggcgctctctggcggtgaagattacgagttgtgtttcactgtgccggaactgaaccgtggcgcgctggatgtggctctcggacacctgggcgtaccgtttacctgtatcgggcaaatgaccgccgatatcgaagggctttgttttattcgtgacggcgaacctgttacattagactggaaaggatatgaccattttgccacgccataaagatgtcgcgaaaagtcgcctgaagatgagtaatccgtggcatctacttgctgtcggattcggaagtggattaagcccgatcgttcctgggacgatgggctcgctggcagcgattccgttctggtatctgatgacctttttgccctggcagctctactcgctggtggtgatgctggggatctgtatcggcgtctatctttgtcatcaaacggcgaaagacatgggtgtgcacgatcatggcagcattgtctgggacgaatttattggtatgtggatcacgctcatggcgctgccgaccaatgactggcagtgggttgccgccgggtttgtgattttccgtattctggatatgtggaagccgtggccgatccgctggtttgatcgcaatgtgcatggcggcatggggatcatgatcgacgatattgtcgccggggtgatttccgcaggcatcctgtattttatcggtcatcactggccgctgggtattctgtcgtagttgtgcaccgatgcctgatgtgacgcttgtcacgtctcatcaggcctggactcttatttaaatcctacgacaggatgcggtttatacggcgtttccagttcggcaatctgttccggcttcaaagtgatatccaccgcgttcaatagctcatcaagctgttcttcgcgcgaagttccgataatcggtgcggcaatgcccggtttactcaacaaccaggccagcgcaacttgtgctcgtgtcgcccccagttcttcactgacgcctgttaaccgctctgcgatctgcgcgtcattttcatcgctttctttatagagatttttccccacctcatcagacaccagtcgtgcggtagtttctccccacggacgcgtcagacggccccttgccagcgggctccatggaattaccgccacgccctcctgataacacagtggtagcatctcgcgctcttcttcacgataaatcagattgtagtgatcctgcatactgacaaactgcgcccagccgtgctgtttttggagttccagtgcctgagcaaactgcgaagcgtgcattgatgacgcgccgatataacgcgctttcccggcttttaccacgtcgttgagggcttccagcgtctcttcgatcggcgtgttgtaatcccagcgatgaatttgcaggatatcgacataatccatgccgagacgtcgcaggctgtcgtcgatagagcgcaaaatttgcgcacgggataatccttccggtaaatcaccaacgcgatggaacactttggtcgcaacgaccacgtcttcacgacgggcgaaatcccgcagtgcgcgaccgacgatctcttcgctgctgccgtcagaataactgttggcggtatcaaagaaatttatgccgccttccagtgcacgtttaattatgggacggctgctttcttccggcagtgtccatgcgtgattaccgcgatctggctcgccaaaggtcatacagccgaggcaaagtcgggaaacgcgaaggtcggtttttcctaaggggttgtattgcatgctgccactcctgctatactcgtcatacttcaagttgcatgtgctgcggctgcattcgttcaccccagtcacttacttatgtaagctcctggggcttcactcgtttgccgccttcctgcaactcgaattatttagagtctatgaataatttcttaagcatagcaggagtggagtagggattatgccagccaggccttgattttggcttccataccagcggcatcgaggccgagttcggcgcgcatttcttcctgagttccttgcggaataaagaagtccggcaggccaatgttcagcacgggtactggtttacgatgggccatcagcacttcgttcacgccgctgcctgcgccgcccataatggcgttttcttctacggtgaccagcgcttcatggctggcggccatttccagaattaacgcttcatcaagcggtttcacaaaacgcatatcgaccagcgtggcgttcagcgattcggcgactttcgccgcttctggcatcagcgtaccaaagttaaggatcgccagtttctcgccacgacgcttcacaatgcctttgccaattggtagtttttccagcggcgtcagttccacgccgaccgcgttgccacgcgggtagcgcaccgctgacgggccatcgttatagtgatagccggtatagagcatctggcgacattcgttttcatcgctcggggtcataatgaccatttccggtatgcagcgcaggtaagagagatcaaaagcaccctgatgggtttgaccgtcagcaccaacaatgcccgcgcggtcgatggcgaacaggaccggaagcttttgaatcgccacgtcatgcagcacctgatcataggcgcgttgcaggaaagtggagtaaatcgcgacaatgggtttgtacccaccaatcgccagacccgcagcaaaggtcaccgcgtgttgctcggcaattgccacgtcgaagtagcgatccgggaatttacgtgaaaactcgaccatgccggaaccttcacgcatcgccggagtaatcgccatcagcttgttgtctttcgctgccgtttcgcacaaccagtcgccaaagatttttgaatagctcggcaaaccgccgctacttttcggcaaacaaccgctggagggatcaaatttaggcacggcgtggaaagtgatcgggtctttttctgccggttcataaccacgaccttttttggtcatgatatgcaggaactgcgggcctttcaggtcgcgcatgttctttagcgtggtgataagccccagcacatcgtgaccgtccaccgggccgatgtagttaaagcccagctcttcaaacaacgtgccaggcactaccatgcctttaatatgttcttcggtgcgtttgagcagctctttaattggcggcacgccagagaaaacttttttcccgccttcgcgcagtgaagagtaaagcttaccggaaagcagctgtgccagatggttgttgagcgcgccgacattttcggaaatcgacatttcattgtcgttgagaatcaccagcatatcaggacggatatcgcccgcgtgattcatcgcttcaaacgccatgcctgcggtaatcgcgccatcgccaatgacacagacggtgcggcgatttttgccttctttttcggcagcaaccgcaataccaattccggcactgatggaggttgatgaatgcccgacgcttaatacgtcatattcgctttcgccgcgccacgggaacgggtgcagaccgcctttctgacggatggtgccgattttgtcgcggcgtccggtcaaaattttatgcggataagcctgatgccccacatcccaaatcaattggtcaaacggggtgttgtagacatagtgcagcgccacggtcagttcgaccgtgcccagcccggaggcgaagtgcccgctggaacggctcacgctgtcgagtaaatagcggcgcagttcgtcgcagagtttcggtaaactctctttcggcaacagtcgtaactcctgggtggagtcgaccagtgccagggtcgggtatttggcaatatcaaaactcatcaggggcctattaatacttattgtttatttattacgctggatgatgtagtccgctagcgcttccagtgccgaggtatcgagtgactgttcagccagttgtttcagcgactgacgggcatcgtcgatcagatcccgggctttcttccgggcttgctcaagacccagaagtgcagggtaggtacttttaccaagttgctggtcggcaccctggcgttttcccaacgttgcagtatctcccaccacatccaggatgtcatcctgaacctggaaggcaaggccgatgctctctgcatacttgtcgagtaccggcagagcacgacgtcctttatctccggcgcttaatgcaccaaggcgaacggcggcgcgaatcaatgcgccggttttatgacgatgaatacgctcaagcgcgtccagaggtacgtgtttgccttccgcgtctaaatctaatgcctgaccaccgcacattccggcaataccactggcgctcgccagttcagaaatcatcgaaattctgtcgcggtccgacacttccggcatatcggcatcgcttaaaatcgagaacgccagcgtttgtaaagcgtcgccagcgagaatcgcgtttgcttcgccaaacttcacatggcaggttggcaaaccgcgacgcagatcgtcatcatccattgccggtaaatcatcatgaattaatgagtaagcgtggatacactcaacggcggcagcgggtgcgtccagcgtgtttgtgctaacgccgaacatatgaccggtggcataaaccaggaaaggtcgcaggcgcttaccacctaataatgcgccatactgcatggtttcgaccacgggagtgttctgaaagggcagtggggcgataaaacggctcagcgcctggttggcctgcttaacgcaggcttcgagttgctgcggaaagtccattactcattgtccggtgtaaaaggggttagagaggcgtcttcattgtcagacagcagaatttgtacgcgctgttcggcttgttgtaatttggcctgcccctgacgtgccagctgcacgccgcgttcgaactcgttcagcgcctcttccagcggcaggtcgccactttccagacgggttacaatctgttccagctcgctcagcgccttttcaaagctggcgggcgcctcatttttcttcggcataatgaatgtctgactctcaatatttttcgccccgtcatggtaacggactcagggcaaatagcaaataacgcgcaatggtaaggtgatgtgcacagcaaagcgatgttagtggtatacttccgcgcctggatgcagccgcaggtgtgggctgctgtatttttccctatacaagtcgcttaaggcttgccaacgaaccattgccgccatgaagtttatcattaaattgttcccggaaatcaccatcaaaagccaatctgtgcgcttgcgctttataaaaatccttaccgggaacattcgtaacgttttaaagcactatgatgagacgctcgctgtcgtccgccactgggataacatcgaagttcgcgcaaaagatgaaaaccagcgtctggctattcgcgacgctctgacccgtattccgggtatccaccatattctcgaagtcgaagacgtgccgtttaccgacatgcacgatattttcgagaaagcgttggttcagtatcgcgatcagctggaaggcaaaaccttctgcgtacgcgtgaagcgccgtggcaaacatgattttagctcgattgatgtggaacgttacgtcggcggcggtttaaatcagcatattgaatccgcgcgcgtgaagctgaccaatccggatgtgactgtccatctggaagtggaagacgatcgtctcctgctgattaaaggccgctacgaaggtattggcggtttcccgatcggcacccaggaagatgtgctgtcgctcatttccggtggtttcgactccggtgtttccagttatatgttgatgcgtcgcggctgccgcgtgcattactgcttctttaacctcggcggcgcggcgcatgaaattggcgtgcgtcaggtggcgcattatctgtggaaccgctttggcagctcccaccgcgtgcgttttgtcgctattaatttcgaaccggtcgtcggggaaattctcgagaaaatcgacgacggtcagatgggcgttatcctcaaacgtatgatggtgcgtgccgcatctaaagtggctgaacgttacggcgtacaggcgctggtcaccggcgaagcgctcggccaggtgtccagccagacgctgaccaacctgcgcctgattgataacgtctccgacacgctgatcctgcgtccgctgatctcttacgacaaagagcacatcatcaacctggcccgccagattggcaccgaagactttgctcgcacgatgccggaatattgtggtgtgatctccaaaagcccgacggtgaaagcagttaaatcgaagattgaagcggaagaagagaagttcgacttcagcattctcgataaagtggttgaggaagcgaataacgttgatatccgcgaaatcgcccagcagaccgagcaggaagtggtggaagtggaaaccgtcaatggcttcggcccgaacgacgtgatcctcgatatccgttctatcgatgaacaggaagataagccactgaaagtcgaagggattgatgtggtttctctgccgttctataaactgagcaccaaatttggcgatctcgaccagaacaaaacctggctgctgtggtgtgagcgcggggtgatgagccgtctgcaggcgctctatctgcgcgagcagggctttaacaatgtgaaggtatatcgcccgtaatttgtggtttttacgtcgcatctggtcagatgcgacgtttgccgcatccgacactactcgtaataattataaatccctgccgccatcaccagttgtgatgccacttcatgggctttttcacgcccaaccaacaggtcgataattttcagaccaaagtcgatagctgtacccggcccctggctggtcagcaattttacccgtgcatcccagacgacgcgcttgtccagccattgttcggcgggaattttgtctttcagcgtcgggaagccggtcatattaccaatcgggaagatatcgtgcggcaccagcacggtggctggcgcggcgcaaatagccgcgacgatacgcccggaacggtggaactgtttaacggtttcaaccagcagagtgctatcgcgaaaacactccgcgcctttaatgccaccaggcagcacgatcacgtcatattcgccatcagccacttcgaccagcggcgcatccgccagcagcttcacgccgcgcgagcaggtaatcgccaggttaccatcgctggcgacgctggcagtggtgactttgataccgccgcgaaccagcagatcgatagtggtgacggcttcagtctcttcactaccaggggcgaggcaaaccagtgccgatgcgctcatattcactctcctttctttttaccatttcaaacaggcgggtgttttccggtacggcaatcccatgcgcgcgggcgcggcgtaagagaaaaccattgatatagtcgatttcagtgtggcgcagcgcgcggatatcctgcaacatcgacgagatattttccgctgtggcatcaatcacctgcatcacgtaatcacgcaaatcttctgctgaagtatgatgcccttcgcgttcgatcaccgccgcgacttcttcgcatatctgcataatttcttgcggatgatgacgtaattcaccgttcgggcaattccagatggcagtcagtggattaatcacgcagttgactgccagcttgcgccacagctcggcgcgaatattgttatgccaggcaacgtcaggcaacacggtttgcaaaatatccgccagataactgtaatccccgtcctgttgccgtgccgggccaatatgcgtgataccgtttgccacatgaataatgacattgccgtcgcggcgggctgcatgggtggtggtgcccatcagtaatggctgctgaatgttttgcaactcttcgatggtgcccatgccgttgtgaattaacagtattggcgtagttacaggcagtgtggacgcgaggcttttgacggcatcggaaacctgccatgctttcagcgtcaccaggagcagatcgctggtggcgagaaaatcgggatcgttggcggtcagcgattcgttaaatatcgaaccatctgtctcaaccagattcacgctacaataaggttgcggtacgcgcagccagccctgaacttcatgaccctgtttgcaaagtgctgtaagccataattgccctaaggcaccgcatcccaatacggtaattttcattgttcctcctcacccgcaaccactccgggtgttcaataaggctatcccttaattgtgcatgctgttgcgactatgcacaattaagggatacgtcctggtgcag

SEQ ID NO: 39 - protein, 367 aa, Escherichia coli
VQDEYYMARALKLAQRGRFTTHPNPNVGCVIVKDGEIVGEGYHQRAGEPHAEVHALRMAGEKAKGATAYVTLEPCSHHGRTPPCCDALIAAGVARVVASMQDPNPQVAGRGLYRLQQAGIDVSHGLMMSEAEQLNKGFLKRMRTGFPYIQLKLGASLDGRTAMASGESQWITSPQARRDVQLLRAQSHAILTSSATVLADDPALTVRWSELDEQTQALYPQQNLRQPIRIVIDSQNRVTPVHRIVQQPGETWFARTQEDSREWPETVRTLLIPEHKGHLDLVVLMMQLGKQQINSIWVEAGPTLAGALLQAGLVDELIVYIAPKLLGSDARGLCTLPGLEKLADAPQFKFKEIRHVGPDVCLHLVGA

SEQ ID NO: 40 - DNA, 10944 bp, Escherichia coli
tgcactcctactatttaatatgtacgttccatgctgaaaagcccgttttcaggatactcaaatggaaacgcacagacatacaaaagattggctggctaatctagccagctcaacccaactttgcaagaaaaatatgcgaaaaaatcagccttggcgctgtttatgcttcggctcggcactgcaaatcacacggatgacaccatcacgcttaacgattttgcagttacggcataatttcttgacggaagcacgaactttcatttttactctccgtaacttctcgggcgaccaattatcggccgtagcctttcaggttcgccttcttcaatgcagactcatactgactggacatcatcagagtttgcacttgagccataaagtccataatcacgacaacaacgataagcagtgaggtcccaccgaagtagaacggtactttcattgcatcacgcatgaactccgggatcaggcagataaaggtaatatacagcgcaccaaccagggtcaggcgggtcattactttatcgatatacttcgccgtttgctctcccggacgaattcctggtacaaatgcaccggacttcttcaggttatctgctgtttcacgcgggttgaaaaccaacgccgtgtagaagaaacagaagaagatgattgcagacgcatagagtaacacataaagcggttgcccaggctgcaaatacagcgaaattgttgtcagccagttccaaccagtaccgcccccgaaccatgacgcgatggtcgccgggaacagaataatactggaagcgaagattgccgggattacccccgccatattcactttcagcggtaaatgtgtgctctgtgcagcatagacacgacgaccttgctgacgtttcgcgtagtttaccacaatgcggcgttgaccacgctcaacaaatacaacaaagaacgtcactgcaaatactaatactgcaaccaacagcaacacgaggaagtgcaggtcgccttgacgcgcttgctcgatagtatgggcaatggctggcgggagtcccgcgacaataccggcgaagataatgattgaaataccgttgccgatacctcgttcagtaatctgttcgcccaaccacatcaggaacatggttcctgtgaccagacttacaacagcggtgaagtagaatgcaaagcccgggttaatcaccaggccttgcataccaggcatattcggcagaccggtagcaataccgatcgactggaatattgccagcaccagagtaccgtagcgggtgtactggctgatcttacgacgaccagactccccttctttcttaatttctgccaacgttgggtgaaccaccgtcagcagctggataatgatcgacgccgaaatatacggcatgatccccagagcaaagatagaagcacggctgagagcaccaccagagaacatgttaaacatctcaatgatggtgcctcgctgttgctcaagcagtttggcaagtacagcggcatcaataccagggatcggaataaaagagccaatacggaacacaatcagcgcaccgataacaaacagcagtctgcgtttcagctcgcctaagccacctttggcactttgaaaatctaatcccggttgtttagccatctgctacttattcctcgattttaccgccagcagcttcgatagcagcacgagcgcctttagtaacacgcaggccacgaacagttaccggagtcgttacttcgccagccaggatcactttcgcgaactcgatctggataccgataatgttagccgctttcagcgtgttcaggtctactacaccgccttctactttagccaggtcagacagacgaatttcggctgtaatcgctgctttacgagaagtgaagccgaatttcggcagacgacggtacagaggcatctgaccaccctcgaaaccgcgacgtacgccaccgccagaacgagacttctgacctttgtgaccacgaccaccggttttaccgaggccagaaccgataccacgacccaggcgtttacccgcctttttggagccttcggccggagacagagtatttaaacgcatctcttactcctcaactttaaccatgaaggaaaccgcgttgatcataccgcgaatagcaggagtatcctcgcgctctacggtgtgaccaatacgacgcagacccaggccaagcagcgttgccttgtgtttcggcagacgaccgattgcactgcgggtttgagtaattttaatagtctttgccatggtttatttccccagaatttcttcaacggatttaccacgcttggcagcgaccatttctggagaattcatattttccaggccatcaatagttgcacgaaccacgttgatcgggttggtggaaccataggctttagccagaacgttatgaaccccagcgacttccagaacggcgcgcattgcaccaccggcgatgataccggtaccttcggaagccggctgcatgaatacgcgagaacccgtgtgaacacctttaacagggtgttgcagagtgccgttattcagcgcgacgttaatcatattgcgacgggctttttccatcgctttctggatcgctgctggaacttcacgcgctttaccgtaaccaaaaccaacgcgaccgttaccatcgccaactacagtcagagctgtgaaggagaaaatacgaccacctttaacggttttagatacgcggtttaccgcgatcagcttttcctgcagttcgccagcttgtttttcgatgtgagccatcttacacctctaccttagaactgaaggccagcttcacgggcagcatctgccagtgcctggacacgaccatgatattggaacccggaacggtcaaaggatacatctttgatgcctttttccagagcgcgttcagcgacagctttacccacagctgcagccgcgtctttgttaccggtgtacttcagttgttcagcgatagctttttctacagtagaagcagctaccagaacttcagaaccgttcggtgcaattacctgtgcgtaaatgtgacgcggggtacgatgtaccaccaggcgagttgcgcccagctcctggagcttgcggcgtgcgcgggtcgcacgacggatacgagcagatttcttatccatagtgttaccttacttcttcttagcctctttggtacgcacgacttcgtcggcgtaacgaacacccttgcctttataaggctcaggacgacggtaggcgcgcagatccgctgcaacctggccgatcacctgcttatcagcgcctttcagcacgatttcagtctgagtcggacattcagcagtgatacccgcaggcagctgatggtcaacaggatgagagaaacccagagacaggttaatcacattgcctttaaccgctgcacggtaacctacaccaaccagctgcagcttcttagtgaagccttcggtaacaccgataaccattgagttcagcagggcacgcgcggtaccagcctgtgcccaaccgtctgcgtaaccatcacgcggaccgaaggtcagggtattatctgcatgtttaacttcaacagcatcgttgagagtacgagtcagctcgccgtttttacctttgatcgtaataacctgaccgttgatttttacgtcaacgccggcaggaacaacgaccggtgctttagcaacacgagacattttttcctccgattaggctacgtagcagataatttcgccaccaagaccagcctggcgcgctgcacgatcagtcataacacctttagaggtagaaacaactgcgatacccagacccgccataactttcggcagctcatctttacgtttatagatgcgcagacctgggcggctgacacgctgaatgctttctacaacagctttgccctggaaatacttcagagtaagttccagttcaggcttggtgtcgccttcaactttaaaatcttcaataaaaccttcttccttcagcacgttggcgattgccactttcagcttggaggaaggcatggtgaccgcagctttgttcgcggcctgaccgttacggatacgggtcagcatatccgcgatcggatcttgcatgctcatctgtctttactcccgtgattcaattggtgacaattaccagctagcctttttcagacccgggatttcaccgcgcatagcggcttcacggaccttaatacggctcaacccgaacttccgcaggaaaccatgcggacgacctgtttgacggcagcggttacgctgacgagacgggctggaatcacgcggcagagtctgcagcttgagaacagcgttccaacgatcttcgtcggaagcgttcacatcagagatgatcgctttcagttcagcgcgtttcgcgaagtatttatcagctaaagctacgcgttttacttcgcgtgctttcattgattgcttagccatttagtaaccctaccttacttgcggaacgggaagtcaaaggcagccagcagagcgcggccttcttcgtcagatttcgcagtagtggtaatggtaatatccaaaccacgaacgcggtcgactttatcgtagtcgatttctgggaagatgatctgctcacggacacccatgctgtagttaccacgaccgtcgaaagacttagcggacaggccacggaagtcacggatacgaggtacagcaatagtgatcaggcgctcaaagaactcccacatgcgttcgccacgcagagttactttacagccgatcggatagccctgacggattttgaagcctgcaacagatttgcgtgctttggtgatcagcggtttttgaccggagattgctgccaggtctgctgctgcgttatccagcagttttttgtcagcgatcgcttcaccaacacccatgttcagggtgatcttctcgacccgagggacttgcatgacagaattgtagttaaactcagtcatgagttttttaactacttcgtctttgtagtaatcatgcagtttcgccatcgtactactccaaattacttgatagtttcgctgttagacttgaagaaacggacttttttaccgtcttcgaatctaaagcctacacggtcagccttgccggttgccgcattgaagattgctacgttggaaacctgaatagcggcttctttttcaacgatgccacccggttggttcagggccggaaccggcttctgatgtttcttaaccaggttgataccttcaacaatgaccttgccggaagacaggacattcttaactttaccgcgtttacctttatctttaccggttaacacgataacttcgtcatcacgacggattttcgctgccatgattcgctccttagagtacttctggtgccagagagataattttcatgaacttctcactacgaagctcacgagttaccggcccaaaaatacgcgtaccgataggctgctcgctgttgttgttcagaagaacacaagcattaccatcgaagcgaatgacagaaccgtccgggcgacgaacacccttcttggtgcgcaccactaccgccttcagcacatcaccttttttgaccttaccacgcggaattgcttctttgatggtgatcttgatgatgtcgcctacgcctgcgtagcgacggtgcgagccacccagaaccttgatacacattacgcgacgtgcaccggagttgtcggcgacgttcagcatagtctgttcttggatcattttagtgctccgctaatgtcaactactactgagacccgaaaatcaggtcgttaaaaatccccatatcgagggcgcggcattataacaccgcttcaaggatatgggtagaaaaaataaacggctcatttctgagccgtttattcgtattgagagagtgtactgtattacagaaccgctttctctacaacgcgaaccagcgtccaggatttagtcttggacagcggacggcattcgcggatttcaaccacgtcaccgataccgcattcgttgttctcgtcatgtacgtgcagtttggtcgtacgcttgatgaatttaccgtagatcgggtgtttcacaaaacgttcgatagcaacaacaatggatttctccattttgtcgctaacaacgcgaccttgcagagtacggattttatcggtcattacgcacccgccttctcgttcagtaaagtcttaacgcgtgcgacatcgcgacgcacttgcttcaacaggtgagactgttgcagctggccacttgcagcctgcatacgcaggttgaactgctcacgcagcaggttcagcagctcggtgttcagctcttcaacgctcttctcacgcagctcttttgctttcattacatcaccgtcttagttacaaaggtggttttaatcggcagtttcgctgctgccagcttgaatgcttcacgggccagctcttccggaacaccgtccatttcatacaggactttacccggctgaatcaaggcaacccaatactccacgttacctttacctttacccatacgcactgccagcggcttttcagtgatcggtttgtccgggaacacacggatccagatcttaccttgacgcttaactgcacgggtcatagcacgacgtgctgcttcgatctgacgggcagtcagacgaccacggccaacagctttcagaccgaagctgccgaagctaacatccgtaccctgcgccagaccgcggttacggcctttgtgcattttacggaattttgtacgctttggttgtaacatcagcgacgctccttatttacggcctttacgctgctgctttttaggctgagcagccggtttttccggttgttcaacagcagccataccacccaggatctcgcctttgaagatccacactttaacgccgattacaccgtaagtggtgtgcgcttcagaggtgttgtagtcgatgtcagcacgcagagtgtgcagcggtacgcgaccttcgcggtaccattcggtacgtgcgatttccgcgccgcccagacggccgctaacttcaactttaatacctttagcgcccagacgcattgcgttctgtacagcacgcttcatagcacgacggaacataacgcgacgttccagctgagaagtgatgctgtcagcaaccagttttgcgtccagttcaggcttacgaacttcggcgatgttgatctgtgcaggaacgccagcgatgtccgctacgaccttacgcagtttttctacgtcttcaccttttttaccgataacgatacccgggcgagcagtgtgaatggttacacggatgctcttagccggacgctcgataacgatacgagatacggacgctttagccagttccttagtcaggtactgacgtactttaaaatcgctgtccaggttgtcagcgaattctttggtgttcgcaaaccaggtagagttccatggttttacaatacccaggcgaataccattaggatgtactttctgacccattgctagtctccagagtctcagcgatcggacacaaccacagtgatgtggctggtgcgcttcaggatgcgatctgcacgaccttttgcacgcggcataatgcgcttcatgctcgggccttcgtctacgaaaattttcgtaactttcagatcgtcaatgtcagcgccatcgttgtgttcagcgttagcaatggcagattccagaactttcttgaccagtacagccgctttcttgttggtgtaggtcaaaatatccagagcctgcgacactttcttaccgcgaatcaggtcagcaacaaggcgaaccttctgagcagaagaacgagcatggcgatgtttagcgatagtttccatctcttcctcctaccttatttcttcttcgcttttttatcagcagcgtggccgcgataagtacgagtcggtgcgaattcacccagtttgtgaccaaccatttcgtcggttacaaataccggaacgtgctgacgaccattatggacagcgatggtcaaaccgatcatgttaggaaagatcgttgaacgacgggaccaagtgcgcaggggcttcttgtctccgctttccaccgctttctctaccttcttcagcaagtgcaggtcaataaaaggacctttcttgagagaacgtggcatggcttatcctctaaaattatttgctacggcgacgtacgatgaatttatcagtacgcttgttgctgcgggtcttcttacctttggtctgaacgccccacggagttaccgggtgcttaccaaagttacgaccttcaccaccaccatgtgggtggtctaccgggttcatcgcggtaccgcgaacggtcggacgaacaccacgccagcgtgcagcacctgctttacccagaacgcgcagcatatgctcagcattgccaacttcgcccagagttgcacggcagtctgcttctactttacgcatttcaccagaacgcagacgcagggtgacataagcaccatcacgagcaacgatctgaacgtaagtaccagcggaacgtgccagctgaccgcctttacctggtttcatttctacgttatgaacagtagaaccaaccgggatgttgcgcatcggcagggtgttacctggtttgattgcagcatcaacgccagactgaatctggtcgccagctttcaggcctttaggggccaggatgtaacggcgttcaccgtctttgtacagaaccagcgcgatgttcgcggaacggttcggatcgtactcaagacgttcaacaactgccgggataccgtctttgttgcgtttgaagtcaacaatacggtaagcctgcttgtggccaccaccgatatgacgagtggtgatacggccattgttgttacgaccaccggatttgctgtttttttccagcaacggagcaaaaggtttgcccttgtgcagctcagggttaaccactttaactacgtggcgacgacccggagatgtcggtttacatttaacaactgccattgtattactcctccgacttactcagcgccgccaacgaagtccagattctggccttctttcagggtgacgtaagcttttttccagtcgctacgacgaccgatacgctgtccgtgacgtttaactttccctttaactaccagggtgttaacgacttcgacttcgacttcaaacagtttctgcacagcagctttgatttctgctttggtcgcgtctttagcaactttgagtacgatggtgttggatttttccatcgcagtagacgctttttcagaaacgtgcggtgcacgcagcaccttcagcagacgttcttcacgaatcatgccagcatctcctcaacttgcttaacagcatcagcagtcattacgactttgtcgaaggcgatcaggctaaccgggtcgataccagttgcatcgcgtacgtcaaccttgtgcaggttgcgcgcagccaggaacaggttttcgtccagctcaccggtgatgatcagcacatcttccagagccatgtctttcagtttctgtgccagcagcttagttttcggcgcttctacagagaacttctcgacaacgatcagacgatcctgacgtaccagttcggacaggatgcttttcagcgcgccgcggtacatcttcttgttaactttttgactgtggtcctgcggacgagcagcaaaggtcacgccaccagaacgccagatcgggctcttgatagaaccagaacgcgcacggccggtgcctttctggcgccacggttttttaccggaaccagttacttcagcacgagtcttctgagcacgagtaccctgacgagcaccagctgcataagcaacaacaacctggtgaaccagcgcttcgttgaaatcacgaccgaaggtagtttcggaaacagtcagcgcgctctgcgcgtctttcaatactaattccattgctatctccttacgccttcacagctggtttaacgatcaggtcgctaccggttgcacccgggacagcacctttaaccagcagcaggttgcgctcagcgtcaacgcgtactacgtcaaggctctgaacggttacacgttcgttacccatctgacctgccattttcttgcctttgaacactttgcccggagtctggttctgaccgatagaacccggaacgcggtgagacaaggagttaccgtgagtagcgtcctgggtacggaagttccagcgcttaacggtacctgcgaaacctttacctttagaggtgccagttacgtcaacttttttaacgtcagcaaacagttcaacgctaatgctctgacctacagtgaactcttcgccttcagccaggcggaattcccacagaccacggccagcttctacgccagctttagcgaagtggccagcttcaggcttggtcacacggttagcttttttagcaccggtggtcacctgaatagcacggtagccatcgttagccaggtctttaacctgagtaacgcggtttgcttcaacttcgattacggttactgggatagaaacgccgtcttctgtgaagatacgggtcatacccacttttttaccgactaaaccaatcattgtttcaacctctcaatcgctcaatgacctgattaacccaggctgatctgcacgtctacaccggcagccagatccagacgcatcagagcatcaacggttttctcggttggctcaacgatgtcaaccagacgcaagtgagtacggatttcgtactgatcgcgcgcgtctttgttgacgtgcggggagatcagaacagtgaagcgctctttgcgtgtcggcagcgggatcggaccacggacctgcgcaccagtgcgcttggcagtctcgacgatttccgcggttgcttgatcgatcagacgatgatcaaacgctttcaggcggatacggattctttggttctgcatgagaccagagctccaattattttataaacgaaaatgattactcctcagacccattacgattgatgggagagtgtaaccgttcttacgtagctccccgattgggagcattgttaggtagccaaattcggctaactgaggttcagattg

SEQ ID NO: 41 - protein, 179 aa, Escherichia coli [sequence omitted]

SEQ ID NO: 42 - DNA, 10390 bp, Escherichia coli
  CDS (432)..(1862)
aaaattcttacgtaatttataatctttaaaaaaagcatttaatattgctccccgaacgattgtgattcgattcacatttaaacaatttcagaatagacaaaaactctgagtgtaataatgtagcctcgtgtcttgcgaggataagtgcattatgaatatcttacatatatgtgtgacctcaaaatggttcaatattgacaacaaaattgtcgatcaccgcccttgatttgcccttctgtagccatcaccagagccaaaccgattagattcaatgtgatctatttgtttgctatatcttaattttgccttttgcaaaggtcatctctcgtttatttacttgttttagtaaatgatggtgcttgcatatatatctggcgaattaatcggtatagcagatgtaatattcacagggatcactgtaattaaaataaatgaaggattatgtaatggaaaactttaaacatctccctgaaccgttccgcattcgtgttattgagccagtaaaacgtaccactcgcgcttatcgtgaagaggcaattattaaatccggtatgaacccgttcctgctggatagcgaagatgtttttatcgatttactgaccgacagcggcaccggggcggtgacgcagagcatgcaggctgcgatgatgcgcggcgacgaagcctacagcggcagtcgtagctactatgcgttagccgagtcagtgaaaaatatctttggttatcaatacaccattccgactcaccagggccgtggcgcagagcaaatctatattccggtactgattaaaaaacgcgagcaggaaaaaggcctggatcgcagcaaaatggtggcgttctctaactatttctttgataccacgcagggccatagccagatcaacggctgtaccgtgcgtaacgtctatatcaaagaagccttcgatacgggcgtgcgttacgactttaaaggcaactttgaccttgagggattagaacgcggtattgaagaagttggtccgaataacgtgccgtatatcgttgcaaccatcaccagtaactctgcaggtggtcagccggtttcactggcaaacttaaaagcgatgtacagcatcgcgaagaaatacgatattccggtggtaatggactccgcgcgctttgctgaaaacgcctatttcatcaagcagcgtgaagcagaatacaaagactggaccatcgagcagatcacccgcgaaacctacaaatatgccgatatgctggcgatgtccgccaagaaagatgcgatggtgccgatgggcggcctgctgtgcatgaaagacgacagcttctttgatgtgtacaccgagtgcagaaccctttgcgtggtgcaggaaggcttcccgacatatggcggcctggaaggcggcgcgatggagcgtctggcggtaggtctgtatgacggcatgaatctcgactggctggcttatcgtatcgcgcaggtacagtatctggtcgatggtctggaagagattggcgttgtctgccagcaggcgggcggtcacgcggcattcgttgatgccggtaaactgttgccgcatatcccggcagaccagttcccggcacaggcgctggcctgcgagctgtataaagtcgccggtatccgtgcggtagaaattggctctttcctgttaggccgcgatccgaaaaccggtaaacaactgccatgcccggctgaactgctgcgtttaaccattccgcgcgcaacatatactcaaacacatatggacttcattattgaagcctttaaacatgtgaaagagaacgcggcgaatattaaaggattaacctttacgtacgaaccgaaagtattgcgtcacttcaccgcaaaacttaaagaagtttaattaatactacagagtggctataaggatgttagccactctcttaccctacatcctcaataacaaaaatagccttcctctaaaggtggcatcatgactgatcaagctgaaaaaaagcactctgcattttggggtgttatggttatagcaggtacagtaattggtggaggtatgtttgctttacctgttgatcttgccggtgcctggtttttctggggtgcctttatccttatcattgcctggttttcaatgcttcattccgggttattgttattagaagcaaatttaaattatcccgtcggctccagttttaacaccatcaccaaagatttaatcggtaacacctggaacattatcagcggtattaccgttgccttcgttctctatatcctcacttatgcctatatctctgctaatggtgcgatcattagtgaaacgatatcaatgaatttgggttatcacgctaatccacgtattgtcgggatctgcacagccattttcgttgccagcgtattgtggttaagttcgttagccgccagtcgtattacctcattgttcctcgggctgaagattatctcctttgtgatcgtgtttggttcttttttcttccaggtcgattactccattctgcgcgacgccaccagctccactgcgggaacgtcttacttcccgtatatctttatggctttgccggtgtgtctggcgtcatttggtttccacggcaatattcccagcctgattatttgctatggaaaacgcaaagataagttaatcaaaagcgtggtatttggttcgctgctggcgctggtgatttatctcttctggctctattgcaccatggggaatattccgcgagaaagctttaaggcgattatctcctcaggcggcaacgttgattcgctggtgaaatcgttcctcggcaccaaacagcacggcattatcgagttttgcctgctggtgttctctaacttagctgttgccagttcgttctttggtgtcacgctggggttgttcgattatctggcggacctgtttaagattgataactcccacggcgggcgtttcaaaaccgtgctgttaaccttcctgccacctgcgttgttgtatctgatcttcccgaacggctttatttacgggatcggcggtgccgggctgtgcgccaccatctgggcggtcattattcccgcagtgcttgcaatcaaagctcgcaagaagtttcccaatcagatgttcacggtctggggcggcaatcttattccggcgattgtcattctctttggtataaccgtgattttgtgctggttcggcaacgtctttaacgtgttacctaaatttggctaaatccttcaagaagccagccattcgctggcttcttgcctctcaggaaatcacttatgtccaaatggcaactcgcctgatcctccttcaccacgtatgctttgcgtcaccttactatcaggacgctttagcccatgtcccgctttttgatttgtagttttgccctggttttactttatcccgccgggattgatatgtacctcgttggtttaccgcgcatcgccgccgatctcaatgccagcgaagcgcagttgcatattgcgttctccgtatatctggcggggatggcagctgcgatgttatttgccggtaaagtggccgatcgttcagggagaaagccggtcgccatacccggcgcggcgctatttattattgcctcggtgttctgttcactggctgaaaccagcacgttatttcttgcaggccgatttctacaggggttgggcgcaggctgttgttacgtagtggcgttcgctattttgcgcgacacgctggatgatcgacgtcgggctaaagtgctgtcattactcaacggtattacctgcatcattccggtgttagcgccagtgctcggacatctgattatgcttaaattcccgtggcagagtctgttctgggcgatggcaatgatgggcatcgcggtactgatgttgtctttgtttattttaaaagaaacgcgcccagcggcccccgcagcttcggataaaccacgagaaaatagcgagtcgctgcttaaccgttttttcctcagccgtgttgttatcaccaccctcagcgtttcggtgatcctcactttcgtcaacacgtcaccggtattgctgatggaaatcatggggtttgagcgcggtgaatacgccaccattatggcgctgaccgctggcgtcagcatgaccgtttcattctccacgccatttgcgctgggaatttttaagccacgtacgttgatgatcacctcgcaggtgttattcctggcggcggggatcactcttgccgtttcaccttcccatgcggtttctctgtttggtatcacgctgatttgcgccggtttctcggtaggttttggtgtggcgatgagtcaggcgttagggccgttttcattacgcgcgggcgtagccagctcgaccttaggtattgcgcaggtttgcggttcgtcactgtggatttggctggcagcggtggttggtatcggcgcatggaatatgctgatcgggattctgattgcctgtagcatagtgagcctgttgctgattatgttcgtcgcgcctggacgccccgttgccgctcatgaagaaatccatcaccacgcttgatctcaatctgctgctttgtctgcaactgctgatgcaggagcgcagcgtaaccaaagcggcgaagcggataaacgtgacaccttcggcggtgagtaagtcgctggcaaagttaagagcgtggtttgacgacccgctctttgtgaactcaccgctgggtctgtcgcccacaccgctgatggtcagcatggagcaaaatctggcggagtggatgcaaatgagcaacctgctgctggataaaccgcaccaccagacaccgcgcggcctgaagtttgagctggcggcggaatcaccgctgatgatgatcatgcttaatgcgctgtcgaaacagatctaccaacgttacccgcaggcgaccatcaaattacgtaactgggattacgattccttagatgccattactcgtggtgaagtggatatcggtttttccggtcgcgaaagccatcctcgctcgcgggagctgttaagctcgctaccgttagccattgattatgaagtgctgtttagtgatgtgccctgcgtctggttacgcaaagatcatccggcactgcatcaaacgtggaatctggacaccttcttacgttatccgcatatcagcatttgctgggaacagagcgatacctgggcgctggacaatgtgttacaggagctgggacgcgaacgcacgattgctatgagcctgccggaattcgagcagtcactgtttatggcagcgcaacccgacaatctgctactggcgaccgcgccgcgctactgtcagtactacaatcaactccatcaactgccgttggttgctcttcctctcccgtttgacgaaagccagcaaaaaaagctggaagttccttttaccctgctgtggcataaacggaacagccataatccgaagatcgtctggttacgggaaaccattaaaaacctttacgcgtcgatggcataaccgaatcgtatgaaacgcgacccaatttcacaataaaatgtaaaaaagttgtaataagcttgtctgaatcgaacttttagccgctttagtctgtccatcattccagtaaatgattactcttgtattcataatggaccattaagcatggagcgaaaaatggcgactcactttgcccgagggattttaacggaaggacatctgatttctgttcgtctcccctcccagtgtcatcaagaagcccgaaacattccccctcatcgtcaaagccgttttctggcgtccagaggtttactcgcagaactgatgttcatgctgtatggcattggcgaattgccggaaatcgtcaccctgccgaaaggtaaaccggttttcagtgataaaaatttgccttcgttttccatttcctatgccgggaatatggttggcgtggcgttaacaaccgaaggtgaatgtggcctcgatatggaactacagcgtgcgacgcgcgggtttcatagcccacacgcgcccgataaccacaccttttccagcaatgaatcgctatggatcagtaaacaaaacgatcctaacgaagcgcgggcgcagctcatcacgctgcgccgaagcgtgctaaaactaaccggtgatgttttgaatgacgatccgcgcgatctgcagctgctgcccattgccggacgcctgaaatgtgctcatgtaaatcatgtagaagcgttatgcgacgcggaagacgtgctggtgtggtccgtggcggtcacgcccacgattgaaaagctcagtgtctgggagttagatggcaaacacggctggaaaagcctgccggatattcacagccgcgccaacaatcctaccagccggatgatgcgttttgcccaactctctaccgtgaaggctttttcgccaaattgatagacaaccacaggagtcatcatgtctgaaaaattgcaggtggttacgttactggggagcctgcgcaaaggctcatttaatggcatggttgcacgtaccctgccgaaaattgctccggcgagcatggaagtcaatgcgttaccatccattgccgacattcccttgtatgacgctgacgtacagcaggaagaaggttttccagcaacggttgaagctctggcggaacagatccgtcaggctgacggtgtggtgatcgtcacgccggaatataactactcggtaccgggtgggctgaaaaatgccatcgactggctttcccgcctgccggatcaaccgctggccggtaaaccggtattgattcagaccagctcaatgggcgtgattggcggcgcgcgctgtcagtatcacctgcgccagattctggttttcctcgatgcaatggtgatgaacaagccggaatttatgggcggcgtgattcagaacaaagttgatccgcaaaccggagaagtgattgatcagggtacgctggaccacctgaccgggcaattgaccgcatttggtgagtttattcagcgagttaagatctaaataaaaaacccgccagcaatcatgcatggcgggtttttaacgcgctatcgattttagtgagcgtcgataaagacaatcttcaggataaacagcagcgcaacgatgattacgcacgggcttagatcacgcagacgtccggtaccgattttcatcacgcagtaggagataaagcccagcgcgataccttcggtaatcgagaagctgaacggcatcatcacggcggtaataaacgccggaacagattcagtaagatcctgccagttcacgcgtgccagactggaagtcatcagcacgccaacgtaaatcagcgcaccagctgcagcgtagcctggcaccatccccgccagcggcgacagaaagataaccagcaggaacagcagaccaacaaccactgccgtcagaccggtacgaccgccaaccgatacgccggaagaggactcaatataagccgtaacggaagaagtaccgataaacgaaccggtcacggaagagatactgtcgacatacagcgcctgcttcatgcgcgggaatttccccttctcatccgccagacctgctttatcggtcacgccaatcagcgtaccggaggagtcaaacaagttgaccaacatgaaagagaaaatcacccctgccagcccgaggttaaacgacccggctaaatctacatgacccacaactgtcattacgctcggcggcgcagaaacgatgccattgtagtgcacatcacccagcatccagcccagcagcgtcgtcaccacgatagaaaccagcaccgctgcgtgaatgttgcgcgaggccagaatagcaatgatgaagaagccgaggatacccagaagtacgctgtgagaagtcagattaccgatgctcaccagcgtttccgggttagcgacaatcacacctgcgtttttcagccccatcatgccaatgaacagaccgataccgctggtaatacccacacgcagactcaccggaatgttggctatcatccagtagcgaacgcggaaaatcgtcagtaacagcagacctatcgcgccccagaagattgcgcccatcccgacctgccacggcaagcccatcgcctgtacaacgacaaaagcgaagaacgcattcaggcccatagcgggtgccagtgcaactggcaggttagcaaacagtcccatcataatactgccgaatgcagcgatcagacaggtagtgacgaagacggcgctggtatccatgccagcaacgccaagaatttgcgggttaacaaaaacgatgtaaaccatcgtcaggaaggtggtaaaaccggcgatcacttcggtccgtgccgtcgtgccatgttcgcgcagtttaaacacgcgttccagcatcccctgaccagaagtctgggtggtatgttgatgactcattatctatttccgaacaaggagggaaaatccgtcgctatcgtataccaaaatgcgacaataggcgcgtttgtgagagacttttttattggatttacttatacggcaacgattgcgttgcgcaaatcggctctacgaaaacgttaaactgattaaaaaggaaaggcatgtcccggatagaagcggtatttttcgactgcgacggtacgctggtcgacagtgaagtcatttgctctcgcgcatatgtaacgatgtttcaggaatttggtattacgctcgatcctgaagaggtattcaaacgtttcaaaggtgtaaaactgtacgaaattatcgatattgtttcccttgaacatggtgttacgttagcgaaaacagaagctgaacacgtttaccgtgcagaagtcgctcggctgttcgattcagaactggaagccatcgaaggggctggagcgctcctgtcagcgatcactgcgccaatgtgtgtggtatctaacggcccaaataacaaaatgcagcattctatgggcaagctgaatatgttgcactacttcccggataaactgttcagcggctacgatattcagcgctggaagccagacccggcgttaatgttccatgcggcaaaagcgatgaatgtaaatgtagaaaactgcattctggttgatgactcagttgccggtgcacaatctggtatcgacgcaggtatggaagtgttctacttctgcgccgacccgcacaataagccgatcgttcacccgaaagtcaccacctttacccatctttcgcagttacctgaactgtggaaagcgcgtggttgggatattacggcatagttcttcacactcccttcacttaccccgcttaaattggcgctcaaaggtaagtaaagggagtttgatatgtctgtttcacgtcgggtaatacatcacggactttattttgcagttttaggaccgttaattggtgttctgtttcttgtcctctacatattcttcgcaaaagaaccgctggttctttgggtgataatacatccaatttttctcttattgtcgataactacgggagctattcctgcgttgttaaccggtgtaatggttgcctgtctgccggaaaagatcgggtcacagaaacgttatcgttgtctggctggtggcataggtggcgtcgttatcaccgagatctattgtgcagttattgtacatattaagggcatggcttcctcggagttgtttgaaaacattctttctggtgacagtctcgttgtccgcatcattcctgcattgctggcaggtgtggtgatgagcagaatcattacccgtctacccggattggatatttcatgtcctgaaacagactctttaagttaagcgggatactttatctttgggctactcaaaagcagacaggatgtttctatgactcaaaatatcaggccgttaccccaattcaaatatcatcccaagccactggaaacaggcgcatttgaacaggataaaaccgtagagtgcgattgctgtgaacaacagacgtcagtttattactcgggtcccttttattgcgttgatgaagttgaacatctctgtccgtggtgtattgcggacggttctgctgctgaaaagtttgcaggtagttttcaggatgatgccagcatagaaggtgttgaatttgagtatgatgaagaggacgaatttgccggtattaagaacacatatcctgatgaaatgctgaaagagttggttgaacgcacgccaggttatcatggatggcagcaggaattctggctcgcgcattgtggcgatttctgtgtttttatcggctatgtgggctggaatgatataaaagatcgcctcgatgaatttgccaaccttgaagaagattgtgagaatttcggtattagaaattctgatctagctaaatgcctgcaaaagggtggtcattgtcagggttatctcttccgctgtctccactgcggcaagctgagactgtggggtgatttttcgtagttatttaaataatgagaacaggccggagcgtaattcacacatccggccttatttcttaagctta

SEQ ID NO: 43 - protein, 476 aa, Escherichia coli
MKDYVMENFKHLPEPFRIRVIEPVKRTTRAYREEAIIKSGMNPFLLDSEDVFIDLLTDSGTGAVTQSMQAAMMRGDEAYSGSRSYYALAESVKNIFGYQYTIPTHQGRGAEQIYIPVLIKKREQEKGLDRSKMVAFSNYFFDTTQGHSQINGCTVRNVYIKEAFDTGVRYDFKGNFDLEGLERGIEEVGPNNVPYIVATITSNSAGGQPVSLANLKAMYSIAKKYDIPVVMDSARFAENAYFIKQREAEYKDWTIEQITRETYKYADMLAMSAKKDAMVPMGGLLCMKDDSFFDVYTECRTLCVVQEGFPTYGGLEGGAMERLAVGLYDGMNLDWLAYRIAQVQYLVDGLEEIGVVCQQAGGHAAFVDAGKLLPHIPADQFPAQALACELYKVAGIRAVEIGSFLLGRDPKTGKQLPCPAELLRLTIPRATYTQTHMDFIIEAFKHVKENAANIKGLTFTYEPKVLRHFTAKLKEV

SEQ ID NO: 44 - DNA, 10118 bp, Escherichia coli
tattcattttgatatgacgaaatgtcatttctttgatgcagaaacggaaatagcaattcgctaaatacagggggaaggcattcccccaggataatacaaggaacaataatgaaaaagttattaccctgtaccgcactggtgatgtgtgcgggaatggcctgcgcacaggccgaggaaaggaacgactggcactttaatatcggcgcgatgtacgaaatagaaaacgtcgagggttatggcgaagatatggatgggctggcggagccttcagtctattttaatgccgccaacgggccgtggagaattgctctggcctattatcaggaagggccggtagattatagcgcgggtaaacgtggaacgtggtttgatcgcccggagctggaggtgcattatcagttcctcgaaaacgatgatttcagtttcggcctgaccggcggtttccgtaattatggttatcactacgttgatgaaccgggtaaagacacggcgaatatgcagcgctggaaaatcgcgccagactgggatgtgaaactgactgacgatttacgtttcaacggttggttgtcgatgtataaatttgccaacgatctgaacactaccggttacgctgatacccgtgtcgaaacggaaacaggtctgcaatataccttcaacgaaacggttgccttgcgagtgaactattatctcgagcgcggcttcaatatggacgacagccgcaataacggtgagttttccacgcaagaaattcgcgcctatttgccgctgacgctcggcaaccactcggtgacgccgtatacgcgcattgggctggatcgctggagtaactgggactggcaggatgatattgaacgtgaaggccatgattttaaccgtgtaggtttattttacggttatgatttccagaacggactttccgtttcgctggaatacgcgtttgagtggcaggatcacgacgaaggcgacagtgataaattccattatgcaggtgtcggcgtaaattactcgttctgataatgggctaaattgccggatgcggcgcgagtactttatccgatctataaatgtaggccggataagatgcgctagcatcgcatctggcattcaggcaaggtagctggtatttatttcagcgtcatatgcgtggcaacggtaatattctgtggtgacggttttccagaaattaagcggaataataactcgcagctttgttgacctaactcctgcgtcggaacatcgatgccgcccggtgcaggcgttaaaataaatgacagcgtttcattgctataacccaccaccgctaactgctgcggaatagcaatatttttctctgctgccgcacgataaatgctcattaatttcaggctgtcagtggcaaacaccgcctcaggcaacggtgactggcttaataattgccgtgctgcttttaatgcagtttcatgggtataaccgccatcaacaatccattcatcacgcactgcaatattatgcgcagccaggctctgcttataaccattaacgcgatcaaccgaaacatggacatcaagcggagcatgcaggcaggcaatattttgatgcccactttcaattaatgcatcggtcaacgcaatgctgtcgccaaaattatcggtatcgacagaataaacatgggcatattgaccttcaactttgccaatcaccaccaccggaatatcatatttatcgagttgggcaaaaaatgactcatccgctggcgaactgagcataataatgcctttaatcattttctgcttaattttgctttcgcatttttgcagatcttctgccggattgtgcgacgtttgtaatatcacgtcgaaaccttcttcttcagctttggcggtgatggcatgcaaaacttcagagaaaaacggattacccgccgtagttttggtcgaacgggtagaaatcaccataatggcatcaaaacccgaagaggtcagcgcgcgggccagcttgtttggctgatactgtaattcttcaatggcccgtaacactttttcgcgcgcttccggggagatattagtttgcttattcagcacgcgtgatacggtggattttgatacgcctgcaaccctggcaatatcataaatagtaggggacataggtcaggaactccgtccgaacgtgaatgctgcacatcttatggagttcgccggtcgatgacaacacgggcagttgataatcaatggcctggcccccacattcatatccttacgaatgattttttttctggtcttcagagcagcacaggacagcaatgaagcgacttaaaaatgaactcaatgcgctggtgaatcggggtgtcgacagacatctgcgcctcgctgtaaccggacttagccgcagcggcaaaacagcgtttatcaccgcgatggttaatcagttgcttaatattcacgccggagcacgtttgccgctgttaagtgcggtgcgtgaagagcgcctgctgggcgtgaaacgcattccccagcgtgactttggcattccgcgcttcacctatgacgaagggctggcgcagttatatggcgatccacccgcctggccaacgccaacgcgcggcgtcagtgaaatccgcctggcgctacgttttaaatcgaatgattcgctgctacgccactttaaggatacctccacgctgtatctggaaattgtggattatcccggcgaatggttgctcgacctgccgatgctggcgcaggactatttaagctggtcgcgccagatgacgggcttactcaatggtcagcgcggagaatggtcggcgaaatggcgaatgatgagcgaagggctggacccgctagcgcctgccgacgaaaaccggctggcggacattgccgccgcgtggaccgattatctccaccactgtaaagagcaggggctgcactttattcagcctgggcgctttgtcttgccgggagatatggcaggtgcgcccgcgctgcaattcttcccgtggccggatgtcgatacctggggcgagtccaaactggcgcaggccgataagcataccaatgccggaatgctgcgcgagcgctttaattattactgcgagaaggtggtgaaggggttctataagaatcattttctgcgctttgaccgccagattgtgctggtggattgcctgcaacctctcaacagtgggccacaggcatttaatgatatgcgtctggcactgacgcagctgatgcaaagttttcactacgggcagcgtaccctgttccggcgtttgttttcgccggttatcgataagctattgtttgctgccactaaagcggaccatgtgaccatcgatcagcacgctaatatggtttcattactgcaacaactgattcaggatgcctggcaaaatgcggcgttcgaagggatcagcatggactgcctggggctggcgtcagttcaggcgaccaccagcggcattattgatgttaacggtgagaaaatcccggcgctgcgtggtaatcgacttagcgatggcgcaccgctcactgtttatcctggcgaagttcccgcacgtttgcctggtcaggcgttctgggataagcaaggcttccagtttgaggcatttcgtccgcaggtgatggatgtcgacaaaccactaccgcatattcgtcttgatgctgcgctggaatttttaataggagataaattgcgatgaccgaaccgttaaaaccacgtattgatttcgacggtcctctggaggtcgatcagaatcctaaattcagggcgcagcagacctttgacgaaaatcaggcgcaaaattttgccccggccacgctcgacgaagcgcaggaagaagaggggcaagtcgaagcggtaatggacgcagcgttacgtccgaaacgcagcctgtggcgcaaaatggtgatgggagggctggctctgtttggcgcaagcgttgtcgggcagggtgtacagtggacaatgaatgcctggcaaacccaggactgggtggcgctgggtggatgtgccgctggggcattgattatcggcgctggcgtaggttctgtggtaacagagtggcggcgcttatggcgcttgcgacagcgcgcccatgaacgcgacgaagcgcgtgatttattgcatagccacggcacgggcaaaggccgcgcattttgcgaaaaactggcgcagcaggcgggtattgatcagtcgcatccggcgctgcaacgctggtatgcctcaatccatgaaacgcaaaacgaccgtgaagtggtcagcctgtatgcgcatttggtccagccagttttagatgcccaggcgcggcgcgaaatcagccgttcggcggcggaatcaacgttgatgattgcggtcagcccgctggcgttggtcgatatggcgtttatcgcctggcgcaatctgcgtttaattaatcgcatcgccacgctgtatggcattgaactggggtattacagccgtttgcgtctgtttaagctggtattgctgaatatcgcttttgccggagccagcgaactggtgcgcgaagtggggatggactggatgtcgcaagatctcgctgctcgtttgtctacccgcgcagctcaggggattggtgcaggacttctgacggcacgactcgggattaaagctatggagctttgccgcccgctgccgtggattgacgatgacaaacctcgcctcggggatttccgtcgtcagcttatcggtcaggtgaaagaaacgctgcaaaaaggcaaaacgcccagcgaaaaataatgcaatatcgggtgctgaccggatatctttacgccgaagtgcccgtttttccgtctttgtgtcaatgattgttgacagaaaccttcctgctatccaaatagtgtcatatcatcatattaattgttcttttttcaggtgaaggttcccatgcgtctggaagtcttttgtgaagaccgactcggtctgacccgcgaattactcgatctactcgtgctaagaggcattgatttacgcggtattgagattgatcccattgggcgaatctacctcaattttgctgaactggagtttgagagtttcagcagtctgatggccgaaatacgccgtattgcgggtgttaccgatgtgcgtactgtcccgtggatgccttccgaacgtgagcatctggcgttgagcgcgttactggaggcgttgcctgaacctgtgctctctgtcgatatgaaaagcaaagtggatatggcgaacccggcgagctgtcagctttttgggcaaaaattggatcgcctgcgcaaccataccgccgcacaattgattaacggctttaattttttacgttggctggaaagcgaaccgcaagattcgcataacgagcatgtcgttattaatgggcagaatttcctgatggagattacgcctgtttatcttcaggatgaaaatgatcaacacgtcctgaccggtgcggtggtgatgttgcgatcaacgattcgtatgggccgccagttgcaaaatgtcgccgcccaggacgtcagcgccttcagtcaaattgtcgccgtcagcccgaaaatgaagcatgttgtcgaacaggcgcagaaactggcgatgctaagcgcgccgctgctgattacgggtgacacaggtacaggtaaagatctctttgcctacgcctgccatcaggcaagccccagagcgggcaaaccttacctggcgctgaactgtgcgtctataccggaagatgcggtcgagagtgaactgtttggtcatgctccggaagggaagaaaggattctttgagcaggcgaacggtggttcggtgctgttggatgaaataggggaaatgtcaccacggatgcaggcgaaattactgcgtttccttaatgatggcactttccgtcgggttggcgaagaccatgaggtgcatgtcgatgtgcgggtgatttgcgctacgcagaagaatctggtcgaactggtgcaaaaaggcatgttccgtgaagatctctattatcgtctgaacgtgttgacgctcaatctgccgccgctacgtgactgtccgcaggacatcatgccgttaactgagctgttcgtcgcccgctttgccgacgagcagggcgtgccgcgtccgaaactggccgctgacctgaatactgtacttacgcgttatgcgtggccgggaaatgtgcggcagttaaagaacgctatctatcgcgcactgacacaactggacggttatgagctgcgtccacaggatattttgttgccggattatgacgccgcaacggtagccgtgggcgaagatgcgatggaaggttcgctggacgaaatcaccagccgttttgaacgctcggtattaacccagctttatcgcaattatcccagcacgcgcaaactggcaaaacgtctcggcgtttcacataccgcgattgccaataagttgcgggaatatggtctgagtcagaagaagaacgaagagtaagcgcgaatatgcctgatggtgcaacaccatcaggcatattaaattatgctttcagtacagccagagctgcttcgtaatccggctcggtggtgatttcatccaccagctggctgaaaatcacattgtcattttcgtcaataaccacaacggcacgcgctgccagacctttcagtgggccatcagcaattgccacaccgtaagcttgcagaaattcagcgttacggaaagtggagagggtgataacgttgttcagaccttctgcgccgcagaaacgagactgggcgaacggcagatcggcagagatacacagcacaacggtgttgtcgatctcagttgccagttggttaaacttacgtactgatgcggcgcaaacaccggtatcaatactcgggaaaatgttcagcactttgcgtttacccgcaaactgaccgagggtgacgtcagacagatcttttgccacgagagtaaaagtctgcgctttgctacccgcctgcgggatggaattggcgactgtaaccgggttgccctggaaatgaacggtttgtgacatgattatctttcctgtttacatatagttaacgtcacacctagtttatgctaactgtcaataacacagcaaacgctatttgcgcttaatccgcagaccaccgcgacaacaaggagtaaagatgagaaccgttaaggtattcgaggaagcctggcccttacataccccgtttgtgattgcccggggaagtcgcagtgaagcgcgcgtggtggtggttgaactggaagaagagggtattaaaggcaccggcgaatgcacgccgtatccgcgttatggggaaagtgatgcctcggtaatggcgcaaattatgagcgtcgtgccgcaactagagaaagggctgacacgggaggagttgcaaaaaattctccctgccggcgcagcacgtaatgcgctggattgtgcattgtgggatctggccgcgcgaagacagcagcaatcgctggctgatttgatcggcataacgcttcccgagacagttatcactgcacagacggttgtcatcggtacgcctgatcagatggccaatagtgcatcaacactctggcaggcaggcgcgaaattactgaaagtgaagctggataaccatcttatcagtgagcggatggtggcaattcgcacagctgtgcccgatgcgacgctgatcgttgatgcaaatgaatcctggcgtgcagaagggttggcggcgcgttgccagctattggcggatttaggcgttgcgatgcttgaacaaccgcttcctgcgcaggacgatgcggcgctggagaattttattcatccgttgccgatttgtgctgatgaaagttgtcatactcgtagcaatttgaaggcgctgaaagggcgctatgagatggttaatattaagctcgataaaaccgggggtctgacggaagcgctggcgctggcgactgaagcgcgtgcacaaggtttcagtctgatgctgggctgcatgttgtgtacctctcgtgccattagcgccgctttaccgctggtgccgcaggtcagtttcgccgatcttgacggaccgacctggctggcggtagatgtggaaccggcgcttcagttcacgacgggcgaattgcatctttaggatgccagcgcagcaagtttgccatcgcaaagagatatttttcgctggcttcgtcggaggagatgggcggaaactctgcggtgatgcaatgcaagttcagatctgcacaccaactgccgaaagagccaggcgtttcataaccgacgctggttaccagaggcaattcaaacgcctgagccagccattcgcctaattcgctgtgtctgggatcttcaatacaggccagtggatcgtggaatgagaccacccaggcaggttgaatgcggtgtataagctggcacagcgcctgggtttcaggttcggagccaggtttgtcacctgtcagtaatacgacatcgcgttcttcagcggcgctgttccagcgataaacggtttcaccttccttccagttcgccgccggaaagtttctgtttaaatccacaccattagcattggcccgtaaccccaactggcagccgtcaggattcacacacagcaccacatgatgacggcgcaaagaaggtgtcaacgtccgcagagcacaggagagcgtgacgaccgaagagttttcatcaccgtgagtgccagccagaatcaaaccactttcgcggctggctgcaggggcaggaaaccagattaacggcgcgcccaataatgaacgtccgtaatgttctgttccgggcggaaatgcgccgcgttcggcgcgtgggcgggttacggtcatgatcgtctctggttcaggaagtattacaggcagtgttgtgcaaattttgcggattatcaaatccttttcttcaacgctatgtcatcgatcttgtatcacttttttgccggaagttgtttgcattttattagttggatagggtttgtggatttttgctggctgacgggcaaataaagtttgtttaatggtttgcttatctgccagttgattaatcacatggcgggctatctgaccgccagcaccaagaatcagtacatttttcatgaaaattatcccagattattggcagcaatatgccagtccatatcactattgcggatttgaatatgtttcattacagagtttcctcaaagaacggagctaatactgaaattgcttcagccacataggctttgccgtcataaagatccatatggtttgcgccttcaacaatgtgatagcgtttatcctggcttgatgctcgatcgtacaggtcgtcactcatccatttgctccctgcctggctgcccgccacaatctgcgtcggctgagtcaggtacacttccgccatatggtaagcatcataggtaataatctggttaaggctgcgcaaagtagcgtaacccggtgctgttggatactgcgcgcgaggggtgtggtaatactcccaggcctgacgcagttcttcgttcggcgcatcggactccttcattggtgccagtggcataatggcgtattctccgctgctaatatcgctggttctggcgtttgaacccgcttcaacgtatggcagggcatcaatagatttcacattgttttcccaaccattacggaatatcgaaccaatattgaccgcactaacggtaccgatggccttgatgcggcgatcctgaattgcagcattggctgtatatcctgcaccggcacaaattcccatcgcaccaattcgggtattgtcgacataagaaagcgttgtcaggtaatcaatcacggcactgatgtcttcagtacgaatgtatgggttttctaactgacgcggctcgccgccactttcaccttgataagatgcgtcataagcaatagtgacaaatcccttttccgccagttttttggcataggttccggccgtttgttctttaacgcccccacctgggtgagataacacaattgcctgatactgacgggtttcatcaaattttggagggaaatagatcactgcagacaaagagatggttggattattgctgttagtgaagctgactttattattcatcattccgttcctcatggagttgtcggttcgttttaacggttggtgatatcactatagatattgatcattaagttgattagacccaaaatcatgattagacctatca

SEQ ID NO: 45 - protein, 168 aa, Escherichia coli
  complement of position 6467-6937 of seq id 44
MSQTVHFQGNPVTVANSIPQAGSKAQTFTLVAKDLSDVTLGQFAGKRKVLNIFPSIDTGVCAASVRKFNQLATEIDNTVVLCISADLPFAQSRFCGAEGLNNVITLSTFRNAEFLQAYGVAIADGPLKGLAARAVVVIDENDNVIFSQLVDEITTEPDYEAALAVLKA

SEQ ID NO: 46 - DNA, 11850 bp, Escherichia coli
  CDS (9115)..(11790)
aaacgtcgagtcgtttacttaaggcctgaagagttcaaacagactttactatcagtgagtcagatgtaagttctgactcactgttgcacaaaagcatatcagacgcctgggaaggcgacaccaaaaggaagctctatgagcgaaaagctacagaaagtgctggcgcgtgccggccacggttctcgccgtgaaatcgaatctattattgaagccggtcgtgtgagtgttgatggcaaaattgctaaactcggcgatcgtgttgaagttacccctggattgaaaatccgtatcgatggtcacctgatttcggtacgtgagtccgctgaacaaatttgtcgcgttctggcctattacaaaccggaaggtgagttgtgtacccgtaacgatccggaaggacgtccaacggtgtttgaccgtctgccaaaactgcgtggcgcacgctggattgccgtgggtcgcttggacgttaatacctgtggtctgctgctgttcaccaccgatggtgaactggcaaaccgtttaatgcacccaagccgtgaagttgaacgtgaatatgccgtgcgtgtatttggtcaggttgacgacgcgaaactgcgtgatttgagtcgtggcgtgcagttggaagatggtccggcagcttttaaaaccatcaagttcagcggcggcgaagggatcaaccagtggtacaacgtgactctgaccgaaggccgtaaccgtgaagttcgtcgtctgtgggaagcggttggtgtgcaggtgagccgcctgatccgtgttcgttacggtgatatcccactgccaaaaggtctgccacgcggtggctggacggagctggacctcgcccagactaactatctgcgcgaactggtggagctaccgccagaaaccagctctaaagtcgctgtagaaaaagaccgtcgtcgcatgaaggcgaatcagattcgtcgtgcggtgaaacgtcacagtcaggtgagcggcggtcgtcgttctggcggacgtaataataacggttaatcaaagtatgccggacgtcatatccggcatttttacagattaataatcgatccctatctgcgcttttacaccggcatcaaacgcatgtttgacggggcgtaattcacttaccgtatctgccagttcaagaatatcccgatgacaaccacgacccgtgataatcaccgtctgttgatgtggacgttcatttaacgcctgcaccacttcttccagtggcaaatagtcatacgccaccatatacgtcagttcatcaagcaaaaccatatccagtgaggaatcagcaagcatccgctttgcatgttgccagacttcgcggcaggcggcggtatcagactcgcggttttgtgtatcccaggtaaagcccgttgccatcacctgaaactcaacgccatgtggctccagcagattgcgttcgccattaggccaggtgcctttaataaactgcacgacgcctactttttttccgtgaccaactgcgcgtgttgccgtaccaaatgccgcggtggttttgccttttccattgccggtaaagacgatgataataccgcgttcatcctgggcctgggccacacgagcatctactttttctttcactcgctgctgacgctgttggtagcgttcatcactcattgggaaattcctggtttacggcccggttgggcgtcaaaggtcatgccggttttacggcggctgtcatcgcccatcagccagaggtagagcggcatgatatcagcgggtgttttaagtttctgtggatcttcggtcgggaaggcgctggcacgcattgcggtgcgcgtaccgcctgggttaatgcagttgacacgcaggcgctgctgatattcatcggccagtacctgcatcatcccttcggtggcaaatttcgacgctgcatatgcaccccagttggctcgtccctgacgtccaacgcttgatgaagtaaagaccagtgaaccggcgtccgatttgagtaataaaggaagcagtgcctgggtgagcataaaggtggcattaacgttgacctgcatgacgtcctgccagacctgcggattttgttcgctcattgggcaaacatcgccgagcaatccggcattatgcaaaacaccatccagacgcggataattaacggcaatgcgctgtgccagttgttggcaattttcggacgtgcaggtcagcaaatcgagaataaaccactgtggctgacgcccagtttcttcgtttatgtggctggctacctgacgtaatttttcttcattacggcccaacagaatcactgtcgcaccatagcgtgcatacgtcatcgcggcttcacgaccaataccatcgctggctcccgtcaccaggataatgcgatcattgagtaaatcttgttttggctggtaatgcatggctactcctcaacgacgttgtctgtcgcgctgccagtgtactttatgactttggggctttatgcctgaaacagaagggcatttcaatcagcctggggcgataacaccgcaaaatggatactttgtcatactttcgctgcaataacatctctgcgagacggcttaacatgcctgttgtaaactgtgagccaaagcgttgtttaaccaaggtggggactcgtggaattgttgtctgaatatggtttgtttttggcgaaaatcgttaccgttgtgctagcgattgcggcgattgccgccattattgtcaatgttgctcaacgtaataaacgccagcgtggcgagttacgggtcaacaatctcagcgaacagtataaggagatgaaagaagaactggccgcggcgctgatggactcacatcagcaaaaacagtggcacaaagcgcagaagaaaaagcataagcaagaagcgaaagcagcaaaagcgaaagccaaactgggcgaggtggcaactgacagtaaaccccgcgtctgggtgctggattttaaaggcagcatggacgcccatgaagtgaactcgctacgtgaagagataacggctgtactcgcagcattcaaaccgcaggatcaggttgtgctccgtctggaaagccctggtggcatggtgcatggttacgggctggcggcttcgcaactgcagcgtctgcgcgataaaaacattcctttaactgttacggtagacaaagtcgctgccagcggcggttacatgatggcctgtgtggcggacaaaattgtttccgcaccgtttgctattgtgggttccattggcgtggtggcgcaaatgcccaactttaaccgcttcctgaaaagcaaagatattgatatcgaactgcacactgccgggcagtataagcgcacgctgacgttgctgggtgaaaataccgaagaagggcgggagaaattccgcgaagagttgaacgaaacgcatcagttgtttaaagattttgtgaagcgtatgcgtccttctctggatattgaacaggtggcaacgggtgaacactggtacggacaacaggcggtagagaaaggcctggttgatgaaatcaacaccagtgatgaagttattcttagcctgatggaaggccgtgaagtggtcaatgtacgctatatgcagcgtaaacgactcattgaccgattcaccggcagcgcggcagagagcgccgatcgattgttgctacgctggtggcagcggggtcaaaagccattgatgtaaaagacaaacgcgaggctaagacctcgcgttttgctttaatcaaccagatgatatttttctgaaagcacatgggccaggtgtttgaacatattaaacaccgcggtgcttttggctgttggcaatccttgttcatctaaaaagtagtcgccggtaaataccagcacgccattacgctgcgtgacgccggtggcttcaatccctgcgagcgtatcctcatgctcacgaatgattttgttggcctctttcaacagcgtttcgcggtcgatgggttgtgtctctttgttcattatttactccttaaacaaggacattagtctacgccaggcatggcttgcagacaaatataccacgctggtggcaagagcgccttactggcaactttggattttgcatgctaataaagttgcgtatcggattttatcaggtacagtgtgacgctttcgtcaatctggcaatagatttgcttgacattcgaccaaaattccgtcgtgctatagcgcctgtaggccaagacctgttaactcagtcacctgaattttcgtgaacagagtcacgacaaggggttgatatccgcagagagcgagtccatatcggtaactcgttgccagtggaaggtttatcaacgtgcgacgcattcctggaagaatcaaattaggtaaggtgaatatgggtaaagctcttgtcatcgttgagtccccggcaaaagccaaaacgatcaacaagtatctgggtagtgactacgtggtgaaatccagcgtcggtcacatccgcgatttgccgaccagtggctcagctgccaaaaagagtgccgactctacctccaccaagacggctaaaaagcctaaaaaggatgaacgtggcgctctcgtcaaccgtatgggggttgacccgtggcacaattgggaggcgcactatgaagtgttgcctggtaaagagaaggtcgtctctgaactgaaacaactggctgaaaaagccgaccacatctatctcgcaaccgaccttgaccgcgaaggggaagccattgcatggcacctgcgggaagtgattgggggtgatgatgcgcgctatagccgagtggtgtttaacgaaattactaaaaacgcgatccgccaggcatttaacaaaccgggtgagctgaatattgatcgtgttaatgcccagcaggcgcgtcgctttatggaccgcgtggtggggtatatggtttcgccgctgctatggaaaaagatcgctcgtggcctgtctgccggtcgtgtgcagtcggtggcggttcgcctggtggtcgagcgtgagcgtgaaattaaagcgttcgtgccggaagagttctgggaagtcgatgccagcacgaccacgccatctggtgaagcgttggcgttacaggtgactcatcagaacgacaaaccgttccgtccggtcaacaaagaacaaactcaggctgcggtaagtctgctggaaaaagcgcgctacagcgtgctggaacgtgaagacaaaccgacaaccagtaaacctggcgctccttttattacctctacgctgcaacaagctgccagcacccgtcttggatttggcgtgaaaaaaaccatgatgatggcgcagcgtttgtatgaagcaggctatatcacttacatgcgtaccgactccactaacctgagtcaggacgcggtaaatatggttcgcggttatatcagcgataattttggtaagaaatatctgccggaaagtccgaatcagtacgccagcaaagaaaactcacaggaagcgcacgaagcgattcgtccttctgacgtcaatgtgatggcggaatcgctgaaggatatggaagcagatgcgcagaaactgtaccagttaatctggcgtcagttcgttgcctgccagatgaccccagcgaaatatgactccacgacgctgaccgttggtgcgggcgatttccgcctgaaagcacgcggtcgtattttgcgttttgatggctggacaaaagtgatgcctgcgttgcgtaaaggcgatgaagatcgcatcttaccagcagttaataaaggcgatgctctgacgctcgttgaacttacaccagcccagcactttaccaagccgccagcccgtttcagtgaagcatcgctggttaaagagctggaaaaacgcggtatcggtcgtccgtctacctatgcgtcgatcatttcgaccattcaggatcgtggctacgtgcgagtagaaaatcgtcgtttctatgcggaaaaaatgggcgaaatcgtcaccgatcgccttgaagaaaatttccgcgagttaatgaactacgactttaccgcgcagatggaaaacagcctcgaccaggtggcaaatcacgaagcagagtggaaagctgtactggatcacttcttctcggatttcacccagcagttagataaagctgaaaaagatccggaagagggtggtatgcgcccgaaccagatggttctgaccagcattgactgcccgacttgtggtcgcaaaatggggattcgcacagcgagcaccggggtattccttggctgttctggctatgcgctgccgccgaaagagcgttgcaaaaccaccattaacctggtgccggaaaacgaagtgctgaacgtgctggaaggcgaagatgctgaaaccaacgcgctgcgcgcaaaacgtcgttgcccgaaatgcggcacggcgatggacagctatctcatcgatccgaaacgtaagttgcatgtctgtggtaataacccaacctgcgacggttacgagatcgaagagggcgaattccgcattaaaggttatgacggcccgatcgttgagtgtgaaaaatgtggctctgaaatgcacctgaaaatggggcgtttcggtaaatacatggcctgcaccaacgaagagtgtaaaaacacacgtaagattttacgtaacggcgaagtggcaccaccgaaagaagatccggtgccattacctgagctgccgtgcgaaaaatcagatgcttatttcgtgctgcgtgacggtgctgccggtgtgttcctggctgccaacactttcccgaaatcgcgtgaaacgcgtgcgccactggtggaagagctttatcgcttccgcgaccgtctgccggaaaaactgcgttatctggccgatgcgccacagcaggatccggaaggtaataagaccatggttcgctttagccgtaaaaccaaacagcaatatgtctcttcggaaaaagacggaaaggcgactggctggtcagcattttatgttgatggcaaatgggttgaaggaaaaaaataacctttaattctgtcaggtttttataaacaaagggtcgcgaaagcggcccttttttattgcatattattttttcttcacacctatacactaaggctataaatgatatagtggttatagttagcaccttttttattattaaatcgtattagtcacccgccaggtgtgacgaaaaaacgatgttctgatggcgtctaagtggatggtttaacatgaaattacaacaacttcgctatattgttgaggtggtcaatcataacctgaatgtctcatcaacagcggaaggactttacacatcacaacccgggatcagtaaacaagtcagaatgctggaagacgagctaggcattcaaattttttcccgaagcggcaagcacctgacgcaggtaacgccagcagggcaagaaataattcgtatcgctcgcgaagtcctgtcgaaagtcgatgccataaaatcggttgccggagagcacacctggccggataaaggttcactgtatatcgccaccacgcatacccaggcacgctacgcattaccaaacgtcatcaaaggctttattgagcgttatcctcgcgtttctttgcatatgcaccagggctcgccgacacaaattgctgatgccgtctctaaaggcaatgctgatttcgctatcgccacagaagcgctgcatctgtatgaagatttagtgatgttaccgtgctaccactggaatcgggctattgtagtcactccggatcacccgctggcaggcaaaaaagccattaccattgaagaactggcgcaatatccgttggtgacatataccttcggctttaccggacgttcagaactggatactgcctttaatcgcgcagggttaacgccgcgtatcgttttcacggcaacggatgctgacgtcattaaaacttacgtccggttagggctgggggtaggggtcattgccagcatggcggtggatccggtcgccgatcccgaccttgtgcgtgttgatgctcacgatatcttcagccacagtacaaccaaaattggttttcgccgtagtactttcttgcgcagttatatgtatgatttcattcagcgttttgcaccgcatttaacgcgtgatgtcgttgatgcggctgtcgcattgcgctctaatgaagaaattgaggtcatgtttaaagatataaaactgccggaaaaataatttcttgcgttattttcggcaccttttatgtagcgaaggtgccggaatatattctcttttgttacttatttctataccgtgcacaatatttttatccctcatatttatagggtaaattacctgtaaagtagtgtctaattacccgcctcgcaaactccagttttcaaatatctatttcaggtcaaaagattgaattattcactggagacgattcgtaaattcgctggatttttgactaaagtttctttaggatttgtctcatcgtatgattaattacaccaatcgttcaacgtcttgctgataagtgatggcgattatatgaggttagcaatgccttctggaaatcaggaaccccgccgcgatcctgaattaaaacgtaaagcctggctggcggtttttcttggttctgcacttttctgggtggttgtcgcactgctgatttggaaagtgtggggataactatggtcggtcaggagcaactggagtcgtcaccattatgccagcatagtgacaatgaaacagaaacgaaacgggaatgttccgtcgttattccagacgactggcaactaacatcgcagcagcaagcctttatagaactgtttgctgaagatgatcagccgaaacaataattatcatcattcttattacccatttttaatgaattaaagggcttttaatacaccgcagcaataacagcttgagttatctcaacacaaaataataaccgttaagggtgtagcctatgatcaacacaaatatgaaatattggtcctggatgggcgcgttttctctgtcgatgctcttctgggccgaactcctctggatcattactcactgatccttgaccccgctgcggcggggttgtcatttgctttgccacaaggtttctcctcttttatcaatttgggttgttatcaaatcgttacgcgatgtttgtgttatctttaatattcaccctgaagagaatcagggcttcgcaaccctgtcattaaggaggagctatgtcgtcaaccctacgagaagccagtaaggacacgttgcaggccaaagataaaacttaccactactacagcctgccgcttgctgctaaatcactgggcgatatcacccgtctacccaagtcactcaaagttttgctcgaaaacctgctgcgctggcaggatggtaactcggttaccgaagaggatatccacgcgctggcaggatggctgaaaaatgcccatgctgaccgtgaaattgcctaccgcccggcaagggtgctgatgcaggactttaccggcgtacctgccgttgttgatctggcggcaatgcgcgaagcggttaaacgcctcggcggcgatactgcaaaggttaacccgctctcaccggtcgacctggtcattgaccactcggtgaccgtcgatcgttttggtgatgatgaggcatttgaagaaaacgtacgcctggaaatggagcgcaaccacgaacgttatgtgttcctgaaatggggaaagcaagcgttcagtcggtttagcgtcgtgccgccaggcacaggcatttgccatcaggttaacctcgaatatctcggcaaagcagtgtggagtgaattgcaggacggtgaatggattgcttatccggatacactcgttggtactgactcgcacaccaccatgatcaacggccttggcgtgctggggtggggcgttggtgggatcgaagcagaagccgcaatgttaggccagccggtttccatgcttatcccggatgtagtgggcttcaaacttaccggaaaattacgtgaaggtattaccgccacagacctggttctcactgttacccaaatgctgcgcaaacatggcgtggtggggaaattcgtcgaattttatggtgatggtctggattcactaccgttggcggatcgcgccaccattgccaatatgtcgccagaatatggtgccacctgtggcttcttcccaatcgatgctgtaaccctcgattacatgcgtttaagcgggcgcagcgaagatcaggtcgagttggtcgaaaaatatgccaaagcgcagggcatgtggcgtaacccgggcgatgaaccaatttttaccagtacgttagaactggatatgaatgacgttgaagcgagcctggcagggcctaaacgcccacaggatcgcgttgcactgcccgatgtaccaaaagcatttgccgccagtaacgaactggaagtgaatgccacgcataaagatcgccagccggtcgattatgttatgaacggacatcagtatcagttacctgatggcgctgtggtcattgctgcgataacctcgtgcaccaacacctctaacccaagtgtgctgatggccgcaggcttgctggcgaaaaaagccgtaactctgggcctcaagcggcaaccatgggtcaaagcgtcgctggcaccgggttcgaaagtcgtttctgattatctggcaaaagcgaaactgacaccgtatctcgacgaactggggtttaaccttgtgggatacggttgtaccacctgtattggtaactctgggccgctgcccgatcctatcgaaacggcaatcaaaaaaagcgatttaaccgtcggtgcggtgctgtccggcaaccgtaactttgaaggccgtatccatccgctggttaaaactaactggctggcctcgccgccgctggtggttgcctatgcgctggcgggaaatatgaatatcaacctggcttctgagcctatcggccatgatcgcaaaggcgatccggtttatctgaaagatatctggccatcggcacaagaaattgcccgtgcggtagaacaagtctccacagaaatgttccgcaaagagtacgcagaagtttttgaaggcacagcagagtggaagggaattaacgtcacacgatccgatacctacggttggcaggaggactcaacctatattcgcttatcgcctttctttgatgaaatgcaggcaacaccagcaccagtggaagatattcacggtgcgcggatcctcgcaatgctgggggattcagtcaccactgaccatatctctccggcgggcagtattaagcccgacagcccagcgggtcgatatctacaaggtcggggtgttgagcgaaaagactttaactcctacggttcgcggcgtggtaaccatgaagtgatgatgcgcggcaccttcgccaatattcgcatccgtaatgaaatggtgcctggcgttgaaggggggatgacgcggcatttacctgacagcgacgtagtctctatttatgatgctgcgatgcgctataagcaggagcaaacgccgctggcggtgattgccgggaaagagtatggatcaggctccagtcgtgactgggcggcaaaaggtccgcgtctgcttggtattcgtgtggtgattgccgaatcgtttgaacgaattcaccgttcgaatttaattggcatgggcatcctgccgctggaatttccgcaaggcgtaacgcgtaaaacgttagggctaaccggggaagagaagattgatattggcgatctgcaaaacctacaacccggcgcgacggttccggtgacgcttacgcgcgcggatggtagccaggaagtcgtaccctgccgttgtcgtatcgacaccgcgacggagttgacctactaccagaacgacggcattttgcattatgtcattcgtaatatgttgaagtaacaactatttgcttgccggttattttgcttccggcaagcaaatgaattacacaatgcaaga

SEQ ID NO: 47 - protein, 891 aa, Escherichia coli
MSSTLREASKDTLQAKDKTYHYYSLPLAAKSLGDITRLPKSLKVLLENLLRWQDGNSVTEEDIHALAGWLKNAHADREIAYRPARVLMQDFTGVPAVVDLAAMREAVKRLGGDTAKVNPLSPVDLVIDHSVTVDRFGDDEAFEENVRLEMERNHERYVFLKWGKQAFSRFSVVPPGTGICHQVNLEYLGKAVWSELQDGEWIAYPDTLVGTDSHTTMINGLGVLGWGVGGIEAEAAMLGQPVSMLIPDVVGFKLTGKLREGITATDLVLTVTQMLRKHGVVGKFVEFYGDGLDSLPLADRATIANMSPEYGATCGFFPIDAVTLDYMRLSGRSEDQVELVEKYAKAQGMWRNPGDEPIFTSTLELDMNDVEASLAGPKRPQDRVALPDVPKAFAASNELEVNATHKDRQPVDYVMNGHQYQLPDGAVVIAAITSCTNTSNPSVLMAAGLLAKKAVTLGLKRQPWVKASLAPGSKVVSDYLAKAKLTPYLDELGFNLVGYGCTTCIGNSGPLPDPIETAIKKSDLTVGAVLSGNRNFEGRIHPLVKTNWLASPPLVVAYALAGNMNINLASEPIGHDRKGDPVYLKDIWPSAQEIARAVEQVSTEMFRKEYAEVFEGTAEWKGINVTRSDTYGWQEDSTYIRLSPFFDEMQATPAPVEDIHGARILAMLGDSVTTDHISPAGSIKPDSPAGRYLQGRGVERKDFNSYGSRRGNHEVMMRGTFANIRIRNEMVPGVEGGMTRHLPDSDVVSIYDAAMRYKQEQTPLAVIAGKEYGSGSSRDWAAKGPRLLGIRVVIAESFERIHRSNLIGMGILPLEFPQGVTRKTLGLTGEEKIDIGDLQNLQPGATVPVTLTRADGSQEVVPCRCRIDTATELTYYQNDGILHYVIRNMLK

SEQ ID NO: 48 - DNA, 10466 bp, Escherichia coli
actatttgcttgccggttattttgcttccggcaagcaaatgaattacacaatgcaagagggttatttgttcagcaaatggcccattttctcggctttggtatcgagataatgttcgttattggggttacgacctacaatcaatggtacgcgttcaacaatattaatccctgcttcggtcagaatttcgacttttttcgggttattggttaacaagcggacttcattgacgccaaggagtttgaacatatcagcgcaaagagtgaagtcgcgctcatcagcggcgaagcctaactggtggttagcctctacggtatcgtaaccttgatcctgcagtgcgtaagcgcggattttattcagcagaccaatgttacgaccttcctgacggtgatacagcaaaataccacggccttcctcggcaatttgcgtcaatgccgcttcgagctggaagccacaatcgcagcgcaagctgaacagggcgtcaccggtcagacattcggaatggacgcgcgcaagtaccggggtatgcccggaaatatcgccatagactagcgcgacatgatcgtgtccggttgccagttcttcaaatcccaccatcaggaaatcgccccatggggttggcagtttggcttctgccacacgtttaagctgcatgaaattctccagataatgctggttctgtattggcttattttgccataacgagaaggggttcacctaatcacgacgcgtcgatcgttcacggaatggcacaaatctgtcaatttttcctggaactggcgttttcagttatgattgtgggacttatcaaaaaggagaggccatgcgttcgattgccagacgtaccgcagtgggagctgcactattgcttgtcatgccagtagccgtatggatttctggctggcgttggcaacctggagaacaaagttggctactaaaagcggctttttgggttactgaaactgtcacccagccctggggcgtcattacacatttgattttattcggctggtttctctggtgtctgcgttttcgcattaaggctgcctttgtattatttgccattctggcggccgcaatccttgtgggacaaggcgttaaatcctggatcaaagacaaagtccaggaaccacgaccttttgttatctggctggaaaaaacacatcatattccggttgatgagttctacactttaaagcgagcagaacgcggaaatctagtgaaagaacagttggctgaagagaaaaatatcccacaatatttgcgttcacactggcagaaagagacggggtttgcctttccttccggtcacacgatgtttgctgccagttgggcactgctggccgttggtttgctgtggccgcgtcggcgaacgttaaccattgctatcttgctggtctgggcaacgggagtcatgggaagccgcctgctgctcgggatgcattggccacgcgatctggtagtagctacgttgatttcgtgggcgctggtggcggtggcaacgtggcttgcgcaacgaatttgtgggccattaacaccacctgcggaagaaaatcgcgaaatagcgcaacgagaacaagaaagttaacgctggttgattttccgaatttagcccttaaatcatcaacaatgcgtgtggatgccatttcgcagacggcgcgaaaatggtactttaaagggctattgcggtaagttgaccataatttattcgctctaaccacataacgggaagtaatgtgaaatatttactcattttcttactggtgttagcgatcttcgtgatttcggtcacgttgggtgcgcagaacgatcaacaggtgacgtttaattatctgttagcgcaaggggagtaccgtatttccacattgctggcggtattgtttgctgcggggtttgctatcggttggttgatttgtggcctgttctggctgcgagttcgtgtttccctggcgcgcgctgaacgtaaaataaagcgactggaaaaccagctttcacccgcgactgacgtggctgtagtgccgcactcgtcagcggcgaaggaataactttctatgctggagttgttgtttctgcttttgcctgtagccgctgcctatggctggtatatgggccgcagaagtgcgcaacaaaacaagcaagatgaagccaaccgcttgtcgcgtgattacgtagcgggggttaacttcctgcttagtaatcaacaggataaagcggtagacctgtttctcgatatgcttaaagaggatacaggcaccgttgaagcccaccttacgctcggaaacctgttccgttcgcgtggcgaagttgatcgcgctattcgcatccatcagaccctaatggaaagcgcctcgctgacctatgaacagcgtctgttggcgattcaacaactggggcgtgattacatggccgccgggttatatgaccgcgcggaagacatgttcaatcagctgaccgatgaaactgacttccgcattggcgcgctgcaacagttgctacaaatctaccaggctaccagtgagtggcagaaagcaattgatgttgccgaacgcctggtgaagctgggtaaagataaacagcgcgtcgaaattgcccatttctactgtgagttagccctgcagcatatggccagcgacgatctcgatcgtgccatgaccttgctaaaaaaaggggcggcggcagataaaaacagcgcccgcgtatccataatgatgggacgcgtgtttatggcgaaaggagaatacgccaaagccgtcgaaagtctgcaacgcgtgatatcccaggacagagaactggtcagcgaaacgctggaaatgttgcaaacctgctatcagcagttgggtaaaactgccgaatgggcagaattcctgcagcgtgcggtggaagagaacaccggtgccgatgctgaattgatgcttgctgatatcatcgaagcgcgcgacggtagtgaggccgcacaggtctatattacgcgccagcttcagcgtcatccgaccatgcgtgtgttccataagttaatggattaccacttaaatgaagcggaagaagggcgtgccaaagagagcctgatggtgctgcgtgacatggttggcgagaaggtacgtagtaagcctcgttatcgttgccagaaatgtggttttaccgcatacaccctctactggcattgtccgtcttgtcgggcctggtcaaccattaaaccgattcgcggtcttgatggcctgtaatttttaaaaaaaatccgactttagttacaacatactaattattaatgttccattgtgctccggcaacgacggcgcagaaaaagcctgccaggggagaaatcgcaactgttaattttttatttccacgggtagaatgctcgccgtttacctgtttcgcgccacttccggtgcccatcatcaagaaggtctggtcatgacgttaactgcttcatcttcttcccgcgctgttacgaattctcctgtggttgttgcccttgattatcataatcgtgatgacgcgctggcctttgtcgacaagatcgacccacgcgattgtcgtctgaaggtcggcaaagagatgtttacattgtttgggccacagtttgtgcgcgaacttcaacagcgtggttttgatatctttcttgacctgaaattccacgatatccccaacactgcagcgcacgctgtcgctgctgcagctgacttaggcgtgtggatggtgaatgttcatgcctctggtggggcgcgtatgatgaccgcagcgcgtgaggcactggttccgtttggcaaagatgcaccgcttttgattgctgtgacagtgttgaccagcatggaagccagcgacctggtcgatcttggcatgacactgtcacctgcagattatgcagaacgtctggcggcactgacgcaaaaatgtggccttgatggtgtggtgtgttctgctcaggaagctgtgcgctttaaacaggtattcggtcaggagttcaaactggttacgccgggcattcgtccgcaggggagtgaagctggtgaccagcgccgcattatgacgccagaacaggcgttgtcggctggtgttgattatatggtgattggtcgcccggtaacgcaatcggtagatccagcgcagacgctgaaagcgatcaacgcctctttacagcggagtgcatgatgagtgattccaacagccgtctggtctactcaacggaaaccggacgtattgatgagcccaaagcggcccctgtacgccctaaaggcgacggtgtggtgcgtattcagcgtcagaccagtggacgtaaaggtaagggcgtttgcctgattaccggtgtcgatctcgatgatgccgaactgacaaaacttgcagcggaactgaagaaaaaatgcggctgcggcggagcagttaaagatggagttattgaaatccagggcgataagcgtgatttattaaaatcactacttgaagcgaaagggatgaaggtaaaactcgcaggcggttaacataaaaagccacggatatatccgtggctttcgaatattttactgtgcgtattattcagttatttcgtactgaacagaatcaagcgtattataattgcgagtcgataatcgacatttatttacgattatttaccgacctggtgaccaataacacctccgacagctgcaccacctaatgtacccaacgtactgccatcggtcagtactgcaccgcctaatgcccctgcacccgcgccgattgcggtgttgcggtcccgtttagaccagttagaacaggcactcagagacattgccaaagtaattgccagaacagccgcggtcatttttttgctcgttacaaacataatactctctcctgaatttatgattcacggaagtaagctctctataactataatagctaagaataagtctggtgaaattattccgtgaaatctgctcgcgcgcagggttatatcacgcaggtgataatgacttcctgttatatcgctgataataattttatatcttgagagtgttaataacaggtaaatagtcttaattatcaaccaggaatcatcttagagcggatgatttgccaaactgcaaatcatccgtagagaagggaaatggttaaatgtcaacgacgtgaatggtgagtttactgtgctcaagatgcatcagatcgctggcgcgtattttcgaatcggtaatcacgcgattgaatcgctcaacgggaccgatggagtatgaatgtacagcaccaaatttcgagctgtcagtcaggactatcgcttcgcactctttttccagcacggcattgaccacatcggtacgcatcatatcgcgaccggtaaatccagtttcaggttgccagccatcaataccaataaatgctttgctgaaatgcacctgttggatgcactggcgtgtcaaagggccaaccatactttcgctttttttctgatacacgccaccgagcaaaataacttcacaaggcgcgtctttcagcaaatgcgcgatgtagctgctgaccgtgatgatagtgacatttttcttctgctcgcccagagtccgggcgagtagggcattgctgctgccattttcgataaagatggtttcgcccggttgaaccagcgacgcggcaaactcggcgagttcacgcttcagcgtatagttgctcatcatacgggtttcgacgtcatcactatcaagcgaaacagcaaagccatgtgcacggcggaggtaactcagtttttcgagtgtgttgagatcctggcgaatggtaacttcagaaactccagtggcttttgccagatcggttacgctaacctgaccctggtcaatgaccatctgtagaatagtttgttgtcgggaattcatcgctgtaattcttataacgttataatacttaataaaaaaatactgacgcgccgggcatcctcaaataggaaaacctgaaggcacgattgttaaatctcccacggtgccttcgggatgtctggcgtagattcagcaacctggcgcaagagttctgctttaagtatctcgagattatggatcgcagagtggtaatcgcctgccacaaggatatctaacacaatatcaatacgttcggcaacgcgctgggcatcaaattcagacatcaaggacatccttatagcaaaagggggaaaatgaataatgcaaaaattgccgctaaaagagaagtgtttaacagcaacggctaattatcatccaggaatacgatatataatgacgggatatagcgctaagtatatatattcatctacttatgcgcgcttcagatagcgtttataccagcgttcgaaggcgacggcgggcatcggtttggcaaacaaaaatccttgccgctcattgatcccgttcttggttaaaaaagcatcttcctttgcactctctacaccttcggcgatcacctgaagattcaatgcctgggccacagcgacgatcgcccggaccagtgactgcgagacaggttgtttgtgaatatctcgaacaaaaacctggtcaagtttgatggcatcgatcggaaagcgcgccagttgcgaaagtgaagagtagccggtaccaaaatcatccagatgcacttgcgcacctagttggctaaattgttgaataacagacagtgccagttcatcattctcaatcagacaactctctgtcagttcaacatctatagggcagtattcaaaattgagttcctggagaacctgtttcagggcggtgaaaatggtttgatcggcgagctgacgtgcagaaatatttaccgccactcgcaggtttatgcctttatcccgccactttgccacctggcgtacgacatcgagaatcacccaacggcctaaaggcacaattagccctgactcttcggcgtaggaaatgaagtccaacggtggaatcaacccacgttcaggtgactgccaacgtactagtgcttccagactgcgcacttcgccacgccaggtgattttcggttgatagtgaataaccaactgatcgttttccagtgctttacgcaagttggtatccagccagagatattcaaatacccgttgattcatttctggggtaaaaacgcaaaattgtcctcgtccgccttccttcgctgtgtacattgctgtgtcggcgtgacgaataatagccgtgctgtctgaaccatgttcgggagagagtgcaatacctactgaacagctggtataaacttcaattaaaccaatgcgaaaggggagccgtaagcgggtcaaaattcgtgatgccattgcttccagcgcgctttgtgaggtgttggatgccagtaccagaaactcatccccacctggacgcgccaacacctggtcatgttcgagacagcttaaaatagccaatgacacgtcgcgtaataactggtcaccaaacaaatgcccataggcgtcgttgacctttttgaaattatccaaatcaagatacacaaccccaactttattgttatctgcatgattaatagcgtgatcgattaaatcctgcattgcgttacgattcggcagtccggtgatactgtcggtatttgccagaatacgcagtcgctcctgagcgcggcgctcttcggtaatgtcggtgccggaacagattaaaaaaatctcgtttttgccactgccgctgtggacaaatttattgcgaaacagaaacagccgctggcctttacatgttggtatccacagttcgacttcatatgcattgccgcttcgaaaaaatacacggttattgcgcctggatgccgcagcttcacgacggctcataaacagtttaaacacgctttgcccaatgacgtcgtgttctttcaaccctgtgtaatcttcacataaccgattgaagcgttggatattcccccggctgtcgagaatcactattgcggaatgtgcttcagaaactacctgctcagcaaaggaaagcccgtgtgataaatcacgagcaaccgccggtgtgtcatgccatgcagacgcgttgccagcccattcccgtttattgatttttcgtcctaccagatgcacagaaagatcgctttcatcgacggtcagactcatcatcaggctggaggtgatgaccgtcatttccctgatgcgagcagcctgttcggcagataactgcaatgtacgatcaggttctgtggtttcggtggtagaaaagcgcaaaacatcgctgctttccgtcaaccgccagtatggattgtgcgatccgagaaagttgtacaacgttgtggactccctaacggttttcatgatgcatatcctccggttaacagcggagtccgcggttaaataaaaggaacaacatgacttacatgaaattaacggcggctaaacgcattgttttttttatatatttatttgtaatccagttttggaaaaacgccagttttcaaacgaaagtcagttaaaaaatctgcctggatataacgaaggtagagcggggaaataaacggcccatccatgaggaatgggccgtgaaaggagattacgcgaccgggcgcgcaataatgctgcgggtttccatgcggacttcggcaatagtgacgtcaataacgtcagtcactttgtaaaccgtttcacctttaatttgtacagtgccgttttcctggctgcaaaccagttcatcgcgcacagcgtgtaagaaaggtgccggaataaaggcgatagcgccgttatcaaccaaacgaacacgcatgccgccacggctgatatcgacaatttccgctgcgaaacgggtgtcggtcccggctttgtctttcaggaagcgtgcgtataaccagtcaccaacatcacgttctgccatccggttgagacggcgacgctcggccatttggacagtgatttcatcctgtgggcgcgtcgcagtttcgcctttgataaccgctttcagcagacggtggttgatcatgtcgccatatttacggatcggcgaagtccaggtggcgtatgcttccagaccgaggccaaagtgaggaccgggttcagtgctaatttcagcaaatgactggaagcgacgaatgcggctgtcgaggaaaccagttggttgcgcgtccagttcacgacgcagtttgcagaaaccgtccagcgtgagcacttcttcggcatcgacatgcagaccgtgcgttttcagcaacgctgccagcgcgtcggcattcgccggatcaaagcccatatgcacgttatagatgccaaaaccgagcttatcgcgcagtacgcgggccgcacaaatgttagcggcaatcatcgcttcttcgacgatacggttggcaatgcgacgaggctcggcgacgatatccagcacttcacctttttcaccgagaataaagcggtaatccgggcgatctttaaacaccagtgcgtggttatgacgccactcgccgcggcgttggcaaatttgcgctagcaaacggacttgttcggcaattgcttcactttcaggctgccagtcaccggtattttccagccagtcagaaacctggtcatacaccagctttgctttggattcgatggtggcggcaaagaattcgatattatcttcaatggtgccatcagcggagagcgtcatgcggcatgccagtaccgggcggacttcattggcgcgcagtgagcagagatcgtcagaaagctcgcgaggcagcatagggatgttgaagccaggcagatagttggtgaatgcgcgaattttcgcggctttgtccagcttgctgccttcagcaatccacgcggttggatcggcaatcgccacaatcagctgaagtttgtcatccggcaacgccttagcgaaaagggcgtcatccatatcttctgtgctggcactgtcgatggtgacaaaatccagcgcggtcagatcttcacgaaccagaccttcatcgagcatttcggtagcgacgccgtctggtgcttctttttccagattatggcgtgcaagggtaacccaccacggtacaaagtgatcgtcaccaaaagtgatgtattgtgtcagttctgcatagaaagaacgatcgcctttcagcggatgacggcgcatttcggcaaccgcccagtcgccttctttaaactcgtggttcaggccacgggctgcgcggcaaggaatggcgtcttttaagagtggatgatcaggaacgatggccagacggtcatttttgccctgaaccttacccacgaaacgagtcaggaacggttcaaccagttcttctggctctgcggattcacgttctttttcactgtggatcaccgcgataattcggtcgccatgcatgacttttttcatctgcggcggcggaatgaaataacttttttgcgcgtcgacttccaggaagccaaagcctttttctgtggcttttaccaccccttcagcgcgtggcgtctgggaatgcagttgctgtttaagctgcgctagcagcgggttgtcctgaaacataattgtctattttggtggccattagagcggctgacagttttacgcgaatctgtctgacgcgg

SEQ ID NO: 49 - protein, 196 aa, Escherichia coli
  complement of position 62-652 of seq id 48
MQLKRVAEAKLPTPWGDFLMVGFEELATGHDHVALVYGDISGHTPVLARVHSECLTGDALFSLRCDCGFQLEAALTQIAEEGRGILLYHRQEGRNIGLLNKIRAYALQDQGYDTVEANHQLGFAADERDFTLCADMFKLLGVNEVRLLTNNPKKVEILTEAGINIVERVPLIVGRNPNNEHYLDTKAEKMGHLLNK

SEQ ID NO: 50 - DNA, 11471 bp, Escherichia coli
ttttaacaaaataagttgcgctgtactgtgcgcgcaacgacattttgtccgagtcgtgaggtactgaaatggcaatacaacaccctgacatccagcctgctgttaaccatagcgttcaggtggcgatcgctggtgccggcccggttgggctgatgatggcgaactatctcggccagatgggcattgacgtgctggtggtggagaaactcgataagttgatcgactacccgcgtgcgattggtattgatgacgaggcgctgcgcaccatgcagtcggtcggcctggtcgatgatgttctgccgcacactacgccgtggcacgcgatgcgttttctcaccccgaaaggccgctgttttgctgatattcagccaatgaccgatgaatttggctggccgcgccgtaacgcctttattcagccgcaggtcgatgcggtgatgctggaaggggtgtcgcgttttccgaatgtgcgctgcttgttttcccgcgagctggaggccttcagtcagcaagatgacgaagtgaccttgcacctgaaaacggcagaagggcagcgggaaatagtcaaagcccagtggctggtagcctgtgacggtggagcaagttttgtccgtcgcactctgaatgtgccgtttgaaggtaaaactgcgccaaatcagtggattgtggtagatatcgccaacgatccgttaagtacgccgcatatctatttgtgttgcgatccggtgcgcccgtatgtttctgccgcgctgcctcatgcggtacgtcgctttgaatttatggtgatgccgggagaaaccgaagagcagctgcgtgagccgcaaaatatgcgcaagctgttaagcaaagtgctgcctaatccggacaatgttgaattgattcgccagcgtgtctacacccacaacgcgcgactggcgcaacgtttccgtattgatcgcgtactgctggcgggcgatgccgcgcacatcatgccggtatggcaggggcagggctataacagtggtatgcgcgacgcctttaacctcgcatggaaactggcgttggttatccaggggaaagcccgcgatgcgctgctcgatacctatcaacaagaacgtcgcgatcacgccaaagcgatgattgacctgtccgtgacggcgggcaacgtgctggctccgccgaaacgctggcagggtacgttacgtgacggcgtttcctggctgttgaattatctgccgccagtaaaacgctacttcctcgaaatgcgcttcaagccgatgccgcaatattacggcggtgcgctgatgcgtgagggcgaagcgaagcactctccggtcggcaagatgtttattcagccgaaagtcacgctggaaaacggcgacgtgacgctgctcgataacgcgatcggcgcgaacttcgcggtaattggctggggatgcaatccactgtgggggatgagcgacgagcaaatccagcagtggcgcgcgttgggcacacgcttcattcaggtggtgccggaagtgcaaattcataccgcacaggataaccacgacggcgtactacgcgtgggcgatacgcaaggtcgcctgcgtagctggttcgcgcaacacaatgcttcgctggtggtgatgcgcccggatcgctttgttgccgccaccgccattccgcaaaccctgggcaagaccctgaataaactggcgtcggtgatgacgctgacccgccctgatgccgacgtttctgtcgaaaaggtagcctgatatgcacgcttatcttcactgtctttcccactcgccgctggtggggtatgtcgacccggcgcaagaggtgctcgatgaggtcaatggcgtgattgccagcgcccgcgagcgtattgcggcattctcccctgaactggtggtgctgtttgcgccagatcactacaacggctttttctatgacgtgatgccaccgttctgtttaggcgttggagcgacggcaattggtgatttcggcagtgcggcaggagagctgcccgtgcctgtggagctggcggaggcctgtgcgcatgccgtcatgaagagcgggatcgatcttgccgtttcttactgtatgcaggtggaccacgggttcgcccagccgctggagttcctgctcggtgggctggataaggtgccagttctgcctgtgttcatcaacggtgtcgccacgccgctgcccggtttccagcgtacccgcatgttgggtgaagccattggacgtttcaccagcactctcaataaacgcgtgctgttcctgggttccggtgggctttcccatcagccgccggtgcccgaactggcgaaagccgatgcccatatgcgcgaccgtctgttggggagcgggaaagatttacccgccagtgagcgcgaattgcgtcagcaacgggtgattagcgccgctgagaagtttgttgaggatcagagaacgctgcatccgctcaacccgatttgggataaccagttcatgactttgctggagcagggacgcatacaggaactggatgccgtcagtaacgaagagctttccgccattgccggaaagtcgacacatgaaatcaaaacctgggtcgccgcttttgccgctatttctgcgtttggcaactggcgtagcgaagggcgttattaccgcccaatcccggagtggattgccggatttggctcgttaagcgccagaacagagaactgaatatgcaggagaagatgatgagttatcagccacaaaccgaagccgccaccagccgttttctgaatgtagaagaagcgggtaaaacgctgcgcatccattttaatgactgcggacaaggcgacgaaaccgttgtcctgctgcatggttccggcccgggtgctactggctgggcgaacttcagccgcaatatcgatccgctggtagaggcgggctatcgggtgatcctgctggattgtccgggttggggcaagagcgattcggtcgttaatagtggttcgcgatcggatcttaatgcacgaatcctgaaaagcgtggtggatcaactggatatcgccaaaatccacctgctgggcaactcgatggggggccatagttctgtggcgttcacccttaaatggccggagcgcgtcggcaaactggtgctgatgggcggcggtacgggcggcatgagtttgtttacgccgatgccaaccgaaggtattaagcgactgaatcagctttatcgtcagccgactatcgaaaacctgaagctgatgatggatatcttcgtttttgataccagcgatttgaccgacgccctgtttgaagcgcgcctgaataatatgctgtcgcgccgcgatcacctggaaaacttcgttaagagcctggaagctaatccgaaacagttcccggattttggcccacgtctggcggaaatcaaagcgcaaaccctgattgtctgggggcgcaacgaccgctttgtgccgatggatgcgggtctgcgtctgctgtccggcattgccggttctgaactgcatatcttccgcgactgtggtcactgggcgcagtgggaacatgccgacgctttcaatcaactggtgctgaatttcctcgcacgcccttaaggaatggtcatgacgaagcatactcttgagcaactggcggcggatttacgccgcgccgcagagcagggcgaagcgattgcaccgctgcgcgatctgattggtatcgataacgctgaagcggcttacgccattcagcacataaatgtgcaacatgacgttgcgcaggggcgtcgcgtggtagggcgtaaagtgggcctgacacatccgaaagtgcaacaacaactgggcgttgatcaaccggattttgggacgttatttgccgacatgtgttatggcgataacgaaatcattcctttttcccgtgttctgcaaccccgcattgaagcggagatcgcactggtgttgaaccgcgatttgcccgcaaccgatatcaccttcgacgaattgtataacgccattgaatgggtacttccggcgctggaagtggtggggagccgcattcgcgactggtcgattcagtttgtcgataccgtggcagataacgcctcctgtggggtgtatgtcatcggcggtccggcgcaacgtccggcggggttagacctgaaaaactgcgccatgaagatgacgcgtaataacgaagaggtttctagcgggcgcggcagcgaatgcctgggacatccgcttaatgcggccgtctggctggcacgcaaaatggccagtctgggtgaaccgctgcgcaccggagatatcattcttaccggggcattaggtccgatggtggcggtgaatgcgggcgatcgttttgaagcccatattgaaggcataggttcagttgctgcgacattttcaagcgcagccccaaaaggaagtctgtcatgagtaagcgtaaagtcgccattatcggttctggcaacattggtaccgatctgatgattaaaattttgcgtcacggtcagcatctggagatggcggtgatggttggcattgatcctcagtccgacggtctggcgcgcgccagacgtatgggcgtcgccaccacccatgaaggggtgatcggactgatgaacatgcctgaatttgctgatatcgacattgtatttgatgcgaccagcgccggtgctcatgtgaaaaacgatgccgctttacgcgaagcgaaaccggatattcgcttaattgacctgacgcctgctgccatcggcccttactgcgtgccggtggttaacctcgaggcgaacgtcgatcaactgaacgtcaacatggtcacctgcggcggccaggccaccattccaatggtggcggcagtttcacgcgtggcgcgtgttcattacgccgaaattatcgcttctatcgccagtaaatctgccggacctggcacgcgtgccaatatcgatgaatttacggaaaccacttcccgagccattgaagtggtgggcggcgcggcaaaagggaaggcgattattgtgcttaacccagcagagccaccgttgatgatgcgtgacacggtgtatgtattgagcgacgaagcttcacaagatgatatcgaagcctcaatcaatgaaatggctgaggcggtgcaggcttacgtaccgggttatcgcctgaaacagcgcgtgcagtttgaagttatcccgcaggataaaccggtcaatttaccgggcgtggggcaattctccggactgaaaacagcggtctggctggaagtcgaaggcgcagcgcattatctgcctgcctatgcgggcaacctcgacattatgacttccagtgcgctggcgacagcggaaaaaatggcccagtcactggcgcgcaaggcaggagaagcggcatgaacggtaaaaaactttatatctcggacgtcacattgcgtgacggtatgcacgccattcgtcatcagtattcgctggaaaacgttcgccagattgccaaagcactggacgatgcccgcgtggattcgattgaagtggcccacggcgacggtttgcaaggttccagctttaactatggtttcggcgcacatagcgaccttgaatggattgaagcggcggcggatgtggtgaagcacgccaaaatcgcgacgttgttgctgccaggaatcggcactattcacgatctgaaaaatgcctggcaggctggcgcgcgggtggttcgtgtggcaacgcactgtaccgaagctgatgtttccgcccagcatattcagtatgcccgcgagctcggaatggacaccgttggttttctgatgatgagccatatgaccacgccggagaatctcgccaagcaggcaaagctgatggaaggctacggtgcgacctgtatttatgtggtggattctggcggtgcgatgaacatgagcgatatccgtgaccgtttccgcgccctgaaagcagagctgaaaccagaaacgcaaactggcatgcacgctcaccataacctgagtcttggcgtggcgaactctatcgcggcggtggaagagggctgcgaccgaatcgacgccagcctcgcgggaatgggcgcgggcgcaggtaacgcaccgctggaagtgtttattgccgccgcggataaactgggctggcagcatgggaccgatctctatgcgttaatggatgccgccgacgacctggtgcgtccgttgcaggatcgaccggtacgagtcgatcgcgaaacgctggcgctgggatacgctggtgtttactcgagcttcctgcgtcactgtgaaacggcggcggcgcgttatggcttaagtgcggtggatattctcgttgagctgggcaaacgccggatggttggcggccaggaggatatgatcgttgacgtggcgctggatctgcgcaacaacaaataatgatgactgccgagaacgtgcattttgtatgcccatcccagcacgactgccggatgcggcgtgaacgccttatccggcctacggatggcgtgagaatttgtaggtctgataagacgcgttagcgtcgcatcaggcatctgcgcacgactgccggatgcggcgtgaacgccttatccggcctacggatggcgcgggaatttgtaggcctgataagacgcgttagcgtcgcatcaggcatctgcgcacgactgccggatgcggcgtgaacgccttatccggcctacgggtggcgcgagaatttgtaggcctgataagacgcgttagcgtcgcatcaggcatctgcgcacgactgccggatgcggcgtaaacgccttatccggcctacggatggcgcgggaatttgtaggcctgataagacgcgttagcgtcgcatcaggcatctgcacacgactgccggatgcgataaacgtcttgtccggcctacatttcgcccgtaggcagtcattaaatagttctgattacgcggctggcaatgtatcagtcgcgattcacctgcactcgcaacgaggttcatcttatgtcgactcgtaccccttcatcatcttcatcccgcctgatgctgaccatcgggctttgttttttggtcgctctgatggaagggctggatcttcaggcggctggcattgcggcgggtggcatcgcccaggctttcgcactcgataaaatgcaaatgggctggatatttagcgccggaatactcggtttgctacccggcgcgttggttggcggaatgctggcggaccgttatggtcgcaagcgcattttgattggctcagttgcgctgtttggtttgttctcactggcaacggcgattgcctgggatttcccctcactggtctttgcgcggctgatgaccggtgtcgggctgggggcggcgttgccgaatcttatcgccctgacgtctgaagccgcgggtccacgttttcgtgggacggcagtgagcctgatgtattgcggtgttcccattggcgcggcgctggcggcgacactgggtttcgcgggggcaaacttagcatggcaaacggtgttttgggtaggtggtgtggtgccgttgattctggtgccgctattaatgcgctggctgccggagtcggcggttttcgctggcgaaaaacagtctgcgccaccactgcgtgccttatttgcgccagaaacggcaaccgcgacgctgctgctgtggttgtgttatttcttcactctgctggtggtctacatgttgatcaactggctaccgctacttttggtggagcaaggattccagccatcgcaggcggcaggggtgatgtttgccctgcaaatgggggcggcaagcgggacgttaatgttgggcgcattgatggataagctgcgtccagtaaccatgtcgctactgatttatagcggcatgttagcttcgctgctggcgcttggaacggtgtcgtcatttaacggtatgttgctggcgggatttgtcgcggggttgtttgcgacaggtgggcaaagcgttttgtatgccctggcaccgttgttttacagttcgcagatccgcgcaacaggtgtgggaacagccgtggcggtagggcgtctgggggctatgagcggtccgttactggccgggaaaatgctggcattaggcactggcacggtcggcgtaatggccgcttctgcaccgggtattcttgttgctgggttggcggtgtttattttgatgagccggagatcacgaatacagccgtgcgccgatgcctgacgtgccttattaggcaggggcgaaagggacttcaccccaatacacctacggcgtttacaggtatactcgctaaaaattattcagcgggtttggaaacaaagatggcaaaacttaccttacaagagcagttgctcaaagcaggattagtcaccagcaaaaaagcggcgaaggtggagagaacggcgaaaaaatcgcgcgttcaggcgcgtgaagctcgggcggcggtagaagaaaataaaaaggcacagcttgagcgtgataaacagcttagcgaacagcaaaaacaagcggcgttggcgaaagaatataaagctcaggtgaagcagcttattgaaatgaaccgaatcaccattgccaatggcgatattggttttaacttcactgacggcaatctgattaagaagatttttgtcgataagctcacacaggcgcagttgattaatggtcgtctggcgattgcccgcttgttggtcgataacaatagcgaaggtgaatacgccattattcccgccagcgttgccgataaaattgctcagcgcgatgccagcagtatagtgttgcacagcgcgctcagcgccgaagagcaggatgaagacgacccgtatgccgacttcaaagtgcctgatgatttgatgtggtaaacatagataagtcgtgcgcagatgcctgatgcgacgctatgcgcgtcttatcaggcctacggtttatgggcgaagtgtagaccggataaggcgttcacgccgcatccggcagtcgtgcgccatgcctgatgcgacgctttgcgcgtcttatcaggcctacggcttacgggcgaagtgtaggccggataaggcgttcacgccgcatccggcagtcgtgctattatcaacgcatattcagtttattggcgtggtaggcaatatgctcgccaataaaactggagacaaaataatagctgtgatcataaccctcgtgataacggattaacgtcttgatattcatctcctggcagatcttttcaagatttggagtccgcagctgttctgcgtaaaaatcatcactcaacccctgatcaaccatgatttccgcaacgcgttgaccttgtgaaataagactcaccgggtcgtaatccaaccaggcatctttattttcagcaagatatgcagcaaaggcttgctgtccccacggcacttgcgatggggagacaatgggcgaaaacgccgagacgctgacatattcatctgggttacgtaacgccagcaccagcgcgcccagcccgcccatagaatgaccagagatagactttttggccgttgccggaaaatgatgcatcactaaatccggcagctcgttgcggatatagtcatacattttgtaatgttcattccacggcgcttgcgtcgcgttcaggtaaaacccggcaccttgcccgagatcgtaacggtcagcatctgcgacatgactgcctcgcggactggtgtccggcgcaacaacaataatgttgtgctcagccgcgtaacgctgcatccccgatttagtaatgaaattctgctcgttgcaggtcaggcctgaaagccagtacagcaccggcaatttttcattcgcggcttttggtgggagatagacgccgacattcatttcacatttcagtgattgggaataatgccgatacatattttgccagccgccaaagctgacatgtttttcaatgagttccatcagtcattatctcagggttaatcccccggacggctgcccggggagagtattaagaacccccgcctgaagtggacggggtaaacctgcgggaaatcagtaacgaattacggttcgaatggatttgccttcatgcatcaggtcgaaggcgtcattaatttcatccaggctcatggtatgcgtgacaaacggttccagatcgatatcacctttcatcgcatcttcaaccatgcccggtaactgggaacgacctttcacgccgccaaacgcggaacctttccatacgcgaccagtgaccaactggaatggacgggtggagatttcctgaccggcaaccgcgaccccgatgatcaccgactgaccccagccgcggtgcgcactttccagcgccgcacgcatcacgttgacgttaccgatgcattcaaaggtatggtcgataccccatttgttgatatccaacaggacatcttttatcggtttgtcgtagtcattcgggttaatgcagtcggtagcaccgaagcgacgcgccagatcgaatttcttcgggttggtatcgatagcgataatccgacccgctttcgcctgacgcgcgccctgaaccactgccagaccaatcgcgccaagaccaaacacggcaacagaatcacctggctggactttagctgtgttgtgtaccgcgccaataccggtggtcacgccacagcccagcaggcagacgtgttcatggtttgcttctggattaatttttgccagagacacttccgcgactacggtgtattcactgaatgtagagcaccccatgtagtgataaagcggctgcccgttgtaagaaaaacgggtggtgccgtctggcatcaggcctttaccctgggtttcgcgaaccgcaacacagaggttagttttgccagaacgacagaactcacactcgccgcactccgcggtgtaaagcgggatcacatggtcgccaggtttgacgctggttacgccttcaccgacttcaaccacaacgccggccccttcgtgaccgagaaccaccgggaatacaccttccgggtcatcgccggagagggtaaatgcgtcggtatggcaaacgccggtatgggtgactttaattagcacttcaccttttttcggtggtgcaacgtcaatttcaacgatttccagcggtttaccgggagcaaatgcaacggcagcacgtgatttcatctctcgctcttcctcaatatggtaatagattcagctatttaagataggcacgaaccagttcaatagtgtcgtcaacggattggctgacttcgcggctgtagcagtcatttcggtcaaacgtttcccggatatggctttcaagcacttctgccatcagcccattagccgcgccccgaacggcagcgatctgttggagtatggcacggcattcggcatcaccctccagcgaccgttccagagcatcaatctgcccccgaatacgacgaactcgagtaaggacctttttcttctcttccggagtactgggcatttcgcacctcatcatctgcatgcaatatactataggggggtattctatatgtcaatgcatacccccctatagtatataacactggagaataaaatttatccggtgaatgtggtcggaaaacaaagaggaaag

SEQ ID NO: 51 - protein, 98 aa, Escherichia coli
  complement of position 11064-11360 of seq id 50
MQMMRCEMPSTPEEKKKVLTRVRRIRGQIDALERSLEGDAECRAILQQIAAVRGAANGLMAEVLESHIRETFDRNDCYSREVSQSVDDTIELVRAYLK

SEQ ID NO: 52 - DNA, 11095 bp, Escherichia coli
  CDS (2747)..(3292)
ataatcctgcttgaacaataaaagcgttatggtaacgcctgcgattaacccggaccagctattcattgcgatggcgcgggaagccaggcttcggtaaattcaaaccagccgcgcggtgtcagtcgcacaccgttcacgccgggaggggcactaatgcgatagtgatagttgaacagcggcgtcagcgtcgcatctgtcattaactggctaaaaaccgctttcagggcattaaatcggttttcttcatcaggcattatttgcacggcatccagtgtcgattgtagatgtgcgtatgctggagcgtcgaaaacatgtggccacagcggatcgcagcgcagccattgctccagagtatattccggtgcttcgccaattaatctgtcgcccatcatgaggtctgcgtgtgcctgtagggtcgtgtcgtcccagttttttgcgttatgaaaaataattgtgagttcacagccttccgctgccagtgtcgcctgtaggcgttctgccatggtatgaagttctatcggtaggtgataaaccagcgtcaaggttttcggtagtttgacttcatccggtacctgccaatgcggaatagtccagcctggcagtaatgcatgactggcggtgatcaggttttctccgacttctaacgtttgtaataaaccggattgatgaataatggagatcacttttcgcgcctgccagagggagagtcggggacttttgcgcaacgtcaaatagcaaaaacctaaactgatgccgctactgacctggctgacccgttgcagctcctccggtttgccgatggtgatttgcacgggatgccgacaactggttcccaaatctttttcgaaaagcggcggagttatccagtactcaaccgctttaagcagcggatgacgtaaatggtaataatcatggctttccaggcgcaccagctctgctgtgaattgtgttaagcgaaaaggacccgtgccgatcagtgggaattgcggatgcgccagatggctgcaatagctcgccagccggtgcgcaagccagtaatcagggcgatgtaaaaagaaggtcagacactgcggatgggtgacttcaatacgcttcacgctaataaataattgatccagtgctggcagttgtaacagcatcaataatcgctggtgtaagtgtgaggcttttactgcatcgccgttatgccagtgtagggttgaacgaagataaaagtcccagcgtaacccgtcagtagaggtttcccagtgatgcgctaaatcgccaatcgggcgctgagtattattatcgaagcgggtcaggccggaaaatatctgcccggcgagatgctgctcggcacggccgggcaaaaagcctggttgtagcggttcgagcgggcgatagtagggaatacgcaacgtgggtgtatcgttttgccattgtccgcccataaacggctgtaacagagtgcgcagctcacctggggccagttgcgccagctccagcacatcttgctgctttccggtttccagtgcctgttccatcatcgcattgcgtagcgattccggcgtgaccagaaagcgtaattgtccgcgctttccgcgtcctgactgcgcctgccactccagccatcccgcctcctgtgcctgacgcaacagcgtacgaacatggcgttcgctgcaaaaacagcgttcggccagttcgctgacggtgacggtttgcggctttccggcggaaggttgccacagacgttgatactggttaagacggttgagcaatcgcatataaacccggaacaatattatttaactattcactattacttccgtatatatcaggtgatactcaatcaccattaaccgtgtcacagagtggagaaagaaatggctcgtctggcagcatttgatatggatggcactttattgatgcccgaccatcatttaggtgagaaaaccctctctactttggcgcgactgcgtgaacgcgacattaccctcacttttgccacggggcgtcatgcgctggagatgcagcatattctcggggcgctatcgctggatgcgtatttgattaccggcaacggaacgcgcgtgcattctctggaaggtgaacttttacatcgtgatgatttacctgcggatgtcgcggagctggtgctgtatcagcaatgggatacccgagccagcatgcatatcttcaatgacgacggttggtttaccgggaaagagatccctgcgttgttgcaggcatttgtctatagcggttttcgttatcagataatcgatgtcaaaaaaatgccactcggcagcgtcaccaagatctgcttctgtggcgatcacgacgatcttacacgcttgcagatccagctatacgaagcattaggcgagcgtgcacatttgtgtttttccgccacggattgcctcgaagtgctgccggtgggctgcaataaaggcgctgcattgacggtgctgacccaacatttaggtttatcgttgcgcgattgcatggcctttggtgatgcgatgaacgatcgcgaaatgttagtcagcgtcggtagcggatttattatgggcaatgcgatgccgcaactgcgcgcggagctcccgcatttaccggtgattggacattgccgaaatcaggctgtctctcactatttgacgcactggctggactatccacatctaccttattcccccgaataacgagatcccttccagcaccgggcaattgcccggttttttttgcgttgaatttgtcattttgtgccgtggtgtttaaaccgcacagaataaattgtcgtgatttcacctttaaaataaaattaaaagagaaaaaaattctctgtggaagggctatgttagataaaattgaccgtaagctgctggccttactgcagcaggattgcaccctctctttgcaggcactggctgaagccgttaatctgacaaccaccccttgctggaagcgcctgaaacggctggaggacgacggtatccttatcggcaaagtcgccctgctggatccggaaaaaataggcctcggcctgaccgcttttgtgctgataaaaacgcaacatcacagcagcgaatggtattgccgctttgtcacggtggttaccgaaatgccagaagtgctggggttctggcgcatggctggtgaatacgattatctgatgcgcgtccaggttgccgacatgaaacgctacgacgagttttataagcgtctggtaaacagcgtgccggggctgtcggacgtcacttccagcttcgcgatggaacagattaaatacaccacttctttacccatcgaataaatatccagaatcaggtcaggacacaacgcgtgcgattatttgctcaattaagctggtatttccgtcgggaatggcgtcgctatctcggggctgtcgccttgcttgtcattatcgcgatgctgcaactggttccgccaaaagtggttggtattgttgtcgatggcgtgacagaacaacactttactaccgggcagatcctgatgtggatcgccaccatggtgctgattgccgttgtggtttatctcctgcgttacgtctggcgggtattgctgtttggtgcgtcttatcaactggctgttgaactgcgtgaagattattaccgtcagctaagccggcagcatcctgagttttacctgcgtcatcgcaccggtgacctcatggctcgtgcgaccaatgacgtcgatcgcgtcgtgtttgccgccggagaaggggtgctgacgctggtggattcactggtgatgggctgcgctgtgttgattatgatgtctacgcaaattagctggcagttgaccttattttccctgttgccgatgccagtgatggcgatcatgattaagcgcaacggcgatgctttgcatgaacgctttaagctggcacaggcggcgttttccagtcttaatgaccgcacccaggaaagcctcaccagtatccgcatgatcaaagcctttggtctggaagatcgccagtcggcgttatttgccgcggatgccgaagataccggcaaaaaaaacatgcgggtggcgcgtattgatgctcgtttcgacccgaccatctatatcgcgattggtatggcgaacttgctggcgattggcggcggtagttggatggtggtgcagggcagtttaacgctgggccagctcaccagttttatgatgtatttaggtctgatgatttggccaatgctggcgctggcatggatgtttaacattgtggaacgtggtagtgctgcgtacagccgtattcgcgcgatgctggcggaagcgccggtggtgaacgatggtagcgaacccgtgccggaagggcgtggcgaactggatgtaaatattcaccagttcacgtatccgcagactgaccatcctgcgctggaaaacgtcaatttcgccctgaaacccggtcagatgctgggtatctgcgggccgactggttccggcaaaagtaccctgttgtcgctcattcagcgtcatttcgacgtcagcgagggggatattcgctttcatgatattcctctgacgaagttacaactcgatagctggcgtagccgcctggcggtagttagccagacgccattccttttttctgacactgtggcgaataacatcgcgctgggttgcccgaatgccacccagcaagagattgagcatgtcgcgcggttagccagcgtacatgacgatattttgcgtctaccgcaaggttacgatacagaggtgggcgagcgcggtgtgatgctttccggcgggcaaaaacagcgtatctccattgctcgtgcgttattagtcaacgcggaaatcctcatccttgatgatgcgctttcggcggtggacggacgcactgagcaccagatcctgcataacctgcgtcagtgggggcagggaagaacggtaatcatcagtgcccatcgcctttctgcactgacggaagccagtgaaattattgtgatgcagcacggacatatcgcccagcgtggcaatcatgatgtgctggcacaacaaagcggctggtatcgcgatatgtatcgctatcaacaactggaggcggcgctcgacgacgctccggaaaatcgcgaggaggccgtcgatgcgtagttttagccaactgtggccgactctcaagcgcctgttagcgtacggttcgccgtggcgtaaaccgctggggattgcggtcctgatgatgtgggttgcggcggcggcagaagtcagtgggccgctgcttatcagctattttatcgacaatatggtagcgaaaaataacctgccgttgaaagtggttgcagggctggctgcggcgtatgttgggctgcaactgtttgccgccgggctacattacgcgcagtcgctgctgtttaatcgggcggcagtaggcgtagtgcaacagttgcgtaccgacgtgatggatgctgcgttacgccagccattaagcgagtttgatacccaacccgtcgggcaggtgatttcccgcgtcactaatgacactgaagtgatccgcgatctctacgttaccgtagtggcaactgtcctgcgcagtgccgcgctggtgggcgcgatgctggtggcgatgttcagcctcgactggcgaatggcactggtggcgataatgattttcccggtggtgctggtggtaatggtgatataccagcgttacagcacgccgattgtccgtcgtgtgcgcgcctatttggcggatatcaacgacggctttaacgaaatcatcaatggcatgagcgttatccagcagtttcgtcagcaggcgcgatttggcgaacgtatgggggaggccagtcgttcacactatatggcgaggatgcaaaccctgcgcctcgacggttttctgctgcgtccgctgctgagtctgttttcatcgctcattctttgtggcttgttgatgctgtttggcttctccgccagcggcaccattgaagtgggcgtgctgtatgcgtttatcagctatcttgggcgacttaacgaaccattaatcgaactgaccacgcaacaggcgatgctgcaacaggctgttgttgctggtgagcgcgtgtttgaactgatggacggaccgcgccagcaatatggcaatgatgatcgcccgttacagagtggcaccatcgaagtcgataacgtgtcatttgcttatcgcgatgacaatctggtgctaaagaacattaatctctctgtgccttcgcgcaattttgtggcgctggtcgggcataccggcagtggcaaaagcaccctcgccagtttattgatgggctattacccgctaacggaaggtgagattcgccttgatggtcgtccattaagttcgctaagtcacagcgcgctgcgccagggcgtggcaatggtgcagcaagatccggtggtgctggcggataccttcctcgccaacgtgacgctggggcgggatatctccgaagaacgcgtctggcaggcgctggaaaccgtgcaactggcggagctggcgcgtagcatgagcgacggtatttacacgccgctgggcgagcaggggaataatctctcagttgggcaaaagcaactgctggcactggcgcgcgtgctggtcgagacgccgcaaatcctgatccttgatgaggcaaccgccagcattgactccggtactgaacaggcgattcaacatgctctggcggcggtgcgtgaacataccacgctggtagtgattgctcaccgcttatcgaccattgttgatgccgacaccattctggtgcttcatcgtgggcaagccgtggagcagggcactcaccagcaactgctggcggcccagggacgctactggcagatgtatcaactgcaacttgcgggcgaagagctggcagccagcgtgcgtgaagaggaatcattgagcgcctgaatagcgcaatatttcatcgttggtgcaaaaatgtaacgcactgtgcactgtcatagtgcgttttcattttcaaacttcttaacttcctgctctctttctcgtttttcatttctggcacaccgcttgcaataccttcttcgtgtagcagaaccattaccgaattctgaccggaggggatctatgaagctggtgaccgtgataatcaaaccattcaagctggaagacgttcgtgaagcgttatcttccattggtattcagggcctgaccgtcaccgaagtgaaaggtttcgggcgtcagaaagggcatgccgagctgtaccggggggcggaatacagcgtcaatttcctgccaaaagtaaaaattgatgtggcgattgctgatgaccaactcgatgaagtgatcgatatcgtcagtaaggcggcttacaccggaaaaattggcgacggcaaaatcttcgtcgctgaattgcaacgcgtcattcgtattcgtaccggcgaagccgacgaagcggcgctgtaatctctggcacacagcaacaggaacgaaaaatgaagatagcgacgataaaaactgggcttgcttcactggcgatgcttccgggactggtaatggctgcacctgcggtggccgataaagccgacaatgcgtttatgatgatttgtactgcgctggtgctgtttatgactattccggggattgccctgttttacggtgggttgattcgcggcaaaaacgtgctgtcgatgctgacgcaggtgacggtgacatttgcactggtctgtattctctgggtggtttacggttactcgctggcgtttggtgagggcaacaacttcttcggcaacattaactggttgatgctgaaaaacatcgaactgacggcggtgatgggcagcatttatcagtatatccacgtggcgtttcagggatcgtttgcctgcattaccgtcggcttgatagttggggcgctggcggaacgaatccgcttctcagctgtgttgattttcgtggtggtatggctgacgctctcttacattccgattgcgcatatggtgtggggcggtggtttgctggcttctcacggtgcgctggatttcgcgggtggcaccgtggtgcacattaacgccgcaatcgccggtctggtgggcgcgtatctgataggaaaacgcgtgggcttcggtaaagaggcgtttaaaccgcacaacctgccgatggtcttcaccgggactgccattctctatatcggttggtttggctttaacgccgggtcagcgggcacggcgaatgaaatcgcggcactggcatttgtgaatactgtggtcgcaacggcggcggcaattcttggctggatcttcggtgaatgggcgctgcgtggtaagccttcactgctgggggcgtgttctggcgcgattgccggtctggtcggcgtgacgccagcctgcggctacattggggttggcggcgcgttgattatcggcgtggtagctggtctggcgggcttgtggggcgttaccatgctcaaacgcttgctgcgggtggatgatccctgcgatgtcttcggtgtgcacggcgtttgtggcattgtcggctgtatcatgaccgggatttttgccgccagctcgctgggcggcgtgggcttcgctgaaggtgtgacgatgggccatcagttgctggtacagctggaaagcatcgccattacgatcgtctggtccggtgttgtggcatttatcggctacaaattggcggatctgacggttggtctgcgtgtaccggaagagcaggagcgagaagggctggatgtcaacagccacggcgagaatgcctataacgcgtaacaagcactgcaaaaaacagccggacggttttcacctccggctatttttttaattgtgattacgcatcaccccttcctgaacggtcgaggcaaccagtacgccgtcttgggtataaaactcaccgcgcacaaagccacgtgcgctggacgccgaggtgctctccacgctatacagcagccattcattcaaattaaacgggcgatggaaccacatggaatggtcaatggtggcaatctgaatccccggttcgagaaaaccgatgccgtgcggctgtagagctaccggcaggaagttaagatcagaagcgtaaccgagcagatactgatgaacgcgcaggtcatccggcacgctaccatttgcgcggatccacacctgacgatgtggttctgcgacgtgacctttcagtgggttatgaaactccaccggacggacttccagcggacgatcgcagatgaatttatctttcagcactggcggcagcaggtgcgccagcgattgggcgatttgcgtttccgaagggaggccatcaggcgctggcgcggacggcattgttttttgatgttcgaaacccgcttctggtgcctggaaagaggcagtcatataaaaaatcggtttgccgttttgaatagcagcaacccggcgggcgctgaagctgttaccgtcacgcagcgtttcgacatcataaataatcggcttcttactatcgccagggcgaagaaagtagctgtgaaacgaatgtaccagccgctcttcagggacggtctcttttgcagcatacaaggcctgacccacgacctggccgccaaacacctggcgtaaacctaaatcttcactctggccgcgaaagagtccttcctcaattttttccagatttaacaatgtcagtaaattttttagcgcctgactcatataactctccagtaacaaagctgccgcagcaagccaaagtgagttgagtataacgcaaatttgctactggtccgatgggtgcaatggtctgaattacgggctaattacaggcagaaatgcgtgatgtgtgccacacttgttgacgttactattttgttaaccactcttccggcgaggaaagttagcccgctggtgcattgataataaggagaaatgaatgaaactcgtgcacatggccagtggtttagcggttgcgattgcgttggcggcttgcgcagataaaagcgcggatattcagacgccagcaccggctgcaaatacgtctatttcagcaacacaacaaccagctatccagcaaccgaatgtctccggtaccgtctggatccgtcagaaagtcgcactgccgcctgatgctgtgctgaccgtgacactttctgacgcgtcgttagccgatgcaccgtcaaaagtgctggcgcagaaagcggtgcgtactgaaggtaaacagtcaccattcagctttgttctgtcatttaacccggcagatgttcagccgaacgcgcgtattctgttgagtgcggcgattaccgtgaatgacaaactggtatttatcaccgataccgttcagccggtgatcaaccagggcggaactaaagccgacctgacattggtgccggtacagcaaaccgccgtgccggttcaggccagcggtggcgcaacgactaccgtaccttcgacttcaccaactcaggtgaatccgtcttcggcagttccagctcctacgcaatattaagcgacgttaaccctctccgcccggagagggttagtagttccagcgataacgctgcaagtcgatttgcccgcttcccgataccatcacaccttctgccagtaatgcctgtcgctgacgctgtaaatccggtccggttagcgaaattgtgccgtggcgattaaccacccggtgccagggtaaggtgctgccttcagggagacgctttaacacaccgcccacctggcgcgcggcgcggggcgatcccgccagtttcgccacatcaccgtaagtggtgacatagccttcgggaatagcggcgacgatttgccagacgcgttggggaaatgaatcttctttttccatcttttcttcctgaggtaatttttcagcataatctggaaaaacgcccgagtgaagtcgcattgcgcaagaaaccagcatctggcacgcgatgggttgcaattagccggggcagcagtgataatgcgcctgcgcgttggttctcaacgctctcaatgggggctctgttggttctcccgcaacgctactctgtttaccaggtcaggtccggaaggaagcagccaaggcagatgacgcgtgtgccgggatgtagctggcagggcccccacccatttctgcctcccaccgtttcgtcaaaaaatcccaacatggctaaactttaaccacaactgacgtcgcaagaattgtctggct

SEQ ID NO: 53 - protein, 181 aa, Escherichia coli
VVFKPHRINCRDFTFKIKLKEKKILCGRAMLDKIDRKLLALLQQDCTLSLQALAEAVNLTTTPCWKRLKRLEDDGILIGKVALLDPEKIGLGLTAFVLIKTQHHSSEWYCRFVTVVTEMPEVLGFWRMAGEYDYLMRVQVADMKRYDEFYKRLVNSVPGLSDVTSSFAMEQIKYTTSLPIE

SEQ ID NO: 54 - DNA, 11756 bp, Escherichia coli
  CDS (4941)..(5417)
atgggctccacaaaatggggacatcaaagaaaagcagtggcactaattaagactgatgccctgcggaaaagttctgcggttgtgcaaaaaaatttcattttcagggcaacttcagttttatcctaatcctggccataccatgacgatgattgtccctgccagcgtcagcaggacgttggcgattgcataggtgcccgcatagcccagcgccgggatgttactgcgagctgtatcactgatgatctccattgccggcgcgcaggtacgtgcgcccatcattgcgccgaacaacagcgcgcggttcattcgcaatacataagcaccgaacaagaaacagataaccacgggcaccagactgacaatcaatccggcaatcaacatctgaccgccaatcgcgcccaggccgttattaataccgctaccggcgctcagaccaacgcctgccataaacaccatcaagccgaactctttcaccatgcttaatgcaccctgcggaatgtaaccgaaggtcgggtggttagcacgcataaagcccagcataattccggcgaataacaacccggcagcgttccccatgccgaaactgaatgtgctgaactggaaggtgatcatcccgatcatcagcccaataacaaagaaggcgcagaatgccagcaggtcagtgacctggctgtgaatcgagataaagccgatgcgatcggcgatggtttttacgcggcgggcatcgccgctgacttgtaaaacgtcacctttgttaagcacgacgttgtcatctatcggcatctcaatctggctacgaatgacgcggttaaggaagcaaccgtgatcggtcaacttcagttgtgcgagacgtttacctacagcgttatggtttttaacgaccacttcttcagtgacgatacgcatgtcgagaaggtcacgatcgaaaacttctttaccgttacggaagctgggatcgagtcgggcatgggcgtcgggatagcctaccaacgctatttcatcgcccatttgtagcacggcatcaccgtctggatttgccagaatcccgttacgtcgaatacgttcaatgtagcagccggtttgtcgataaatacccagttcacgcagatttttgccgtcggtccaggccaccagttccgggccgacgcgataggcgcggatcaccggtaaataaaccttacggttggcatcagtgtccaggccacgttcgcgggcgatttgctgggcgctggtctgtaagtcctgatgctgcaatttcggcaagtaacgcgcaccaacaatcaaactcaccagaccgattaaataggttaaggcatacccgaggctcagattatccagtgccagtgagagctgcctgctttccatgccggaatgacgcagtgtatcgccagcaccgaccagaaccggtgtcgacgtcatagagcctgctaacataccggccgtcaggccaatatcccagccaaacagcttacctaaccctaaggcgatcaccagcgcactgccaaccatcaccagtgctaacattaggtaatttttcccatcgcgaaaaaaaatggaaaaaaagttcggtccggcttcgaccccgacgcagaaaataaacagcataaagccaagattaagcgcatcggtgttaatgctgaaatgttgttggcctaataacagcgatacgactaaaacgccaatggaattacccagttggatcgaaccaagtcgtaactttccgagacatagcccaagcgcgaggaccacaaataataacagaatgtaattcccatttaacaattcggcgacgtttatattcacggaggctaacttcttgtttactagtaagctgttgaaagaaatggtaatttacgataatgttttttaccagaattcagggcgcagattcattcagcgcacctaaacgatagtaaagtaacaatatattttactagtgtaatcacattaggtatcaacggctatatgaattgcgttggcctatattagcatggaatgcgaagcggctttatcttactgaacgccacactggcgaaaaatgtgttcgatagacgcagtgtcaggaggaacgagtgaaacataaacaacgttgggcgggggcaatctgctgttttgtcctcttcattgtggtgtgcctttttctggcgacgcacatgaaaggcgcttttcgggctgccgggcatcctgaaatcggcttgctatttttcattcttcctggagcagtcgccagcttcttttcacagcgtagagaagtcctgaaacctctgtttggcgcaatgctggcggcaccctgttcgatgctcattatgcggctgtttttttcaccgacgcgctcattctggcaagagctggcatggttactaagcgcggtgttctggtgtgcgctgggggcactgtgtttcttatttatcagtagtttgtttaaaccacagcacagaaaaaatcagtaaagccctcaacgcgagggcttgtcagacgatcaggcgtccagattttctttcacccatgcagcaaaatcggtatagccgccgatatgttgctgatcgacaaaaatctgcggcacggtttctacgggtttacctgccttttgttgtagatcttctttagtgatcccttccgcacgaatatctacatactgatactgaaaatcatcgcgttcattgctcaatttctcagccagatcttttgcacgcacacagtaagggcaacccgaacgaccaaaaataacggtttgcattatttctctcctcatagatttatgcctgtaatgatcacgctaaaatgtattcgctgaaagtaggtttaacctgttgcattaattgctaaaagctataactgttaaacacaatacagtgaaaagttttagactgaaggctcactttgcagagggaagcgtatgcgcgcgatcggtaaattgcctaaaggcgtgttgatactggaatttatcggaatgatgctactggcggtggcgctgctgtcggtaagcgactccctgtcgctgcctgagccattttctcggccagaagtgcagattctgatgatttttctcggtgttttgctcatgcttcccgctgcggtggtggttattcttcaggtggcaaaacgtcttgccccacagctgatgaaccgtccaccgcaatattcacgttcagaaagagaaaaagataatgacgccaaccattgaacttatttgtggccatcgctccattcgccatttcactgatgaacccatttccgaagcgcagcgtgaggcgattattaacagcgcccgtgcgacgtccagttccagttttttgcagtgcagtagcattattcgcattaccgacaaagcgttacgtgaagaactggtgacgctgaccggcgggcaaaaacacgtagcgcaagcggcggagttctgggtgttctgtgccgactttaaccgccatttacagatctgtccggatgctcagctcggcctggcggaacaactgttgctcggtgtcgttgatacggcaatgatggcgcagaatgcattaatcgcagcggaatcgctgggattgggcggggtatatatcggcggcctgcgcaataatattgaagcggtgacgaaactgcttaaattaccgcagcatgttctgccgctgtttgggctgtgccttggctggcctgcggataatccggatcttaagccgcgtttaccggcctccattttggtgcatgaaaacagctatcaaccgctggataaaggcgcactggcgcagtatgacgagcaactggcggaatattacctcacccgtggcagcaataatcgccgggatacctggagcgatcatatccgccgaacaatcattaaagaaagccgcccatttattctggattatttgcacaaacagggttgggcgacgcgctaaaaccgccacgtcgatgtatgatacgcgggcttttgaccaggtctgacagagaggtgcagggtgaaaattgccatattgtcccgggatggaacgctctattcgtgtaagcggctgcgtgaagccgctatacagcgcggtcacctggttgaaattcttgatccgctttcttgctacatgaacataaatcctgcggcgtcttctattcactacaaaggccgcaagttaccccattttgacgcagtgatcccgcgtattggcaccgccattaccttttatgggacggcggcactgcgccagttcgagatgctggggagctatccgctcaatgagtcggtcgccattgcccgggcgcgtgacaaattgcgttccatgcaactgctggcgcgtcagggcatcgacctgcctgtcacgggcattgcgcattcgccggatgataccagcgatttaatcgacatggtcggtggtgcgccgctggtggtcaagttggttgaaggcacgcagggaattggcgtcgtgctggcggagacgcgtcaggcggcggaaagcgtgattgacgctttccgcggtctgaacgcgcatattctggtgcaggaatatatcaaagaggcgcaagggtgcgatatccgctgtctggttgttggcgatgaagtggtcgctgcgattgaacggcgggcgaaagagggcgattttcgttccaatttgcatcgtggcggcgcggcaagcgtcgccagtatcacaccacaggagcgtgaaatcgcgataaaagccgcgcgaacgatggcgctggacgttgctggtgtggatattctgcgtgctaatcgcgggccgttggtgatggaggtgaatgcgtcgccggggctggaaggaatagaaaaaaccaccggtatcgacatcgcgggtaaaatgatccgctggatcgaacgccacgctacgacagaatattgcctgaaaacgggtggttagtcgcaatcacattactgatcatggttttgcctgcgctttttgcgtaagctgtgccggtctttttatcgaaagaggttgtacaaaattatgacatcgctggtcgttcctggtctggatacgctgcgtcaatggctcgatgacctggggatgagtttttttgaatgtgataactgtcaggctctgcatctgccccatatgcagaatttcgacggtgtctttgatgccaaaatcgatctgatcgataacacgatcctgttttctgccatggcggaagtccgaccttcagccgtattgccgctggcggcggatttatctgccatcaatgccagttcgctgaccgtgaaagcatttcttgatatgcaggatgataatctgccaaagctggtggtttgccagtctttatccgttatgcagggcgtaacctatgagcagtttgcatggttcgtgcgtcagagcgaagagcagatttcgatggtcattcttgaagctaatgcccatcaactgctgttaccgactgatgatgaagggcaaaacaacgttaccgaaaactatttcctccactgataactcctttcgagcacgcagtcgctggtgcagtggctgcgcgctgcaaaattatctgctgtttttaaccttttcttaaagattatttcacttctcttgtgtcgatttggctttatcacatagagcaaatatgcataaaaatttgttaaataccgttttttaatccgagctatagtctcaaaccctggctaaagttattcttgcgatgcttttatatagcgagcagtgctggccgggagaaagttctcttttcttacaccgcgccgataaaaaatatgcacgtttattgcatatctttcagtgtgacaacttttgttcgtttgttaacgaactttcagaaggaaagagatatgaccgccttaaataaaaaatggctatcgggtctggttgcgggtgctctgatggccgtctctgtcggcacgctcgcggctgaacaaaaaacactccacatttataactggtctgattatatcgccccggacacggtggccaattttgaaaaagaaaccggtattaaagtcgtctacgatgttttcgactctaacgaagtactggaaggcaaattaatggccgggagtaccggctttgatctggtggttccatctgccagctttctggagcgccagttgactgcgggagttttccagccgctggacaaaagcaaattgccggagtggaagaatctcgacccggaactgctgaagctggtcgccaaacacgatcccgacaataaatttgctatgccctatatgtgggcgacgaccgggattggctataacgttgataaagttaaagcggtgctgggcgaaaacgcgcccgtcgatagctgggacttgatcctcaaacctgaaaatctggaaaaactgaaaagctgcggtgtctctttcctggatgcgccagaagaagtttttgctaccgtgttgaattatctcggcaaagatcccaacagcactaaagcggatgattacaccggaccggcaacagatctgctgttaaagctgcgcccgaacattcgttatttccattcatctcaatacattaacgacctggcaaacggcgatatttgcgtcgctatcggctgggcaggtgatgtctggcaggcgtcaaaccgcgcgaaggaagcgaagaatggcgtgaatgtctcgttctcgattccaaaagaaggggcgatggcgttctttgatgtattcgccatgcctgcggatgccaaaaacaaagacgaagcctatcagttcctgaattacctgctgcgcccggatgtagtagcgcatatttccgaccatgtgttctatgccaacgccaataaagcagccacgccgctggtgagtgcggaagtccgtgagaacccaggtatttatccgcctgcggatgttcgtgcgaagctgttcactctgaaagtgcaggatccgaaaatcgaccgtgtgcgcacccgcgcgtggaccaaagtgaagagcggaaaataatccgcagtcgtagatgccggaggggcgcaccacacccgccggcaattcgcaccattatggtgcgcttgcacacattcaatgccggagagcagccgtgaatgacgctatccctcgcccgcaggcgaaaacccgtaaggcgctgacgccgctattagaaatccgcaacctgaccaaatcctacgatggtcaacatgcggtggatgatgtcagcctgaccatctacaaaggtgaaatcttcgcgctgctgggcgcatccggctgtggcaagtccacgctgctgcgtatgctggcaggtttcgaacaaccttctgccggacagataatgcttgatggcgtcgatttgtcacaggttccgccttacctgcgccccatcaatatgatgtttcagtcttacgcgctgtttccgcatatgaccgtggaacagaacatcgcttttggcctgaaacaggacaaactaccgaaagcggaaattgccagccgggtcaatgagatgctcggcctggtgcatatgcaggagttcgccaaacgcaaaccgcatcagctttccggtggtcagcgacaacgtgtggccctggcccgaagccttgcgaagcgcccgaaactattactgctcgatgagccgatgggcgcgctggataaaaagctgcgtgacaggatgcagcttgaagtggtggatattctggagcgcgtcggtgtgacttgtgtgatggtcacccacgatcaggaagaggcgatgaccatggcggggcgcatcgccattatgaatcgtgggaaatttgtccagattggcgaaccggaagagatctacgagcatccgactacccgctatagcgccgaatttattggctcggtaaacgtctttgaaggcgtactcaaagagcgtcaggaagatggcctggtgcttgattcgccggggctggtgcatccactgaaagtcgacgcggatgcctcggtggtcgataacgtgccggtacatgtggcgctgcgcccggaaaaaatcatgctttgcgaagagccgcccgccaatggttgtaacttcgcggtgggggaggtgatacacattgcctatctcggcgatctttcggtgtatcacgttcgtctgaaaagtgggcagatgattagcgcccagctacaaaacgcccatcgtcatcgtaaagggttaccgacctggggcgacgaagtgcgtttgtgctgggaagtggacagctgtgtggtgctgacggtttaaggagcaaagatgagtacacttgaacctgctgcccagtcgaaaccgccgggcggatttaagctgtggttgtcgcagctgcaaatgaagcatgggcgcaaactggtcattgcgttgccatatatctggttgatcttgctgtttctgctgccatttctgattgtctttaaaataagcctggcggagatggcgcgcgctattccaccttataccgaactgatggagtgggctgacgggcaactgtccatcactcttaatctcggtaattttctgcaactgaccgacgatccgctctatttcgatgcttatctccagtcgctacaggtggctgcgatttcgacattttgctgtttactgatcggctatccgctggcgtgggcggtggcgcacagtaagccttcgacccgtaatattttattactactggtgatcctgccgtcgtggacctcgtttctgatccgcgtttatgcctggatgggaatattaaaaaacaacggtgtgctgaataattttctgctgtggctgggggttatcgatcaaccgctgaccattctgcataccaatctggccgtttatatcggcattgtttacgcttacgtgccgtttatggtactgccgatttataccgcgttgattcgtattgattattcgctggtggaagcagcgctggatctcggtgcacgaccgctgaaaacgttctttactgtgatcgtgccgctgactaaaggtgggattattgccggatcgatgctggtgtttatcccggctgtgggcgagtttgtgatcccggaactgctcggtggcccggacagcatcatgatcgggcgcgtgctatggcaagagtttttcaataaccgcgactggccggtggcctcggcggtagcgatcatcatgttgctgctgctaattgtgccgataatgtggttccacaaacaccagcaaaaaagcgtgggagaacacggatgaataatttaccggtagttcgttcgccctggcggattgtgattttgctgctgggctttacctttctctacgcgccaatgctgatgctggttatctattcgtttaacagctcgaagctggtgacggtgtgggccggctggtcaacgcgctggtatggtgagttattgcgcgatgacgcgatgatgagtgcggttggtttaagtctgacaattgcggcctgtgcggcgacggcggcggcgatcctcggaactattgcggcggtggtgctggtgcgctttggcaggtttcgcggatcaaatggctttgcctttatgatcaccgcgccgctggtaatgccagatgtcatcacgggcttgtcgctgttgttattattcgtcgcgcttgctcatgccattggctggcctgcggaccgcggtatgctcaccatctggctggcgcatgtcactttttgtacggcttatgtggcggtcgttatttcttcaagattgcgggaactggatcgctcgatagaagaagcagcgatggatctcggtgcgacgccgctgaaagtgtttttcgtcattacgctaccgatgatcatgcccgcgatcatttctggctggttactggcttttactttgtcgcttgatgatctggtgatcgccagctttgtttccgggccgggagccaccacgttaccgatgctggtcttttccagcgtgcggatgggggtgaatccggaaatcaacgccctggcaacattgatcctcggcgcggtcggaattgtcggatttatcgcctggtatctgatggctcgcgcagaaaaacagcggatacgcgacatccagcgtgcaagacgtggctgaagacactaaaatttgccaacctggctacataatgccgcgcatgtcgcggcattgttttcatggaagacgaaacgttgggattttttaagaaaacatcttcatctcatgctcgcctgaatgtgcctgcgctggtgcaggtggcggcgctcgccattattatgatccgtggcctcgacgtgctgatgattttcaatacgctgggcgtgcgcggtattggcgagttcattcatcgcagcgtacaaacctggagtttaacgctggtctttttaagcagtctggtgctggttttcattgagatctggtgtgcgttttcactggtgaaagggcgtcgctgggcgcgctggctatatctgctgacacaaatcaccgccgcaagttacttgtgggcggcttcgctggggtacggttatccggagctgttcagcattcccggtgaatcaaaacgtgaaatcttccatagcctgatgctgcagaagctgccggatatgctcatcctgatgctgctgttcgttccctcgaccagtcggcggttcttccagttgcaataatgtgtataatcgtcgcccctgatgatgtgaaggtcaatgtatgcagtgcgcactttacgacgcgggtcgctgtcgttcctgtcagtggataatgcagccgattccagagcaactctccgctaaaaccgccgatcttaaaaatctgctcgccgactttccggttgaggaatggtgcgcgccggtgtcaggcccggaacaagggtttcgtaataaagccaaaatggtggtgagtggtagcgttgaaaaaccactgctcggtatgctgcatcgcgatggcacaccagaagacctttgtgactgcccgctttatcctgcctcatttgcgcccgtttttgcggcgctaaaaccgtttatcgcccgagcggggttaacgccctacaacgtggcgcgtaagcgtggcgaactgaaatacattctgctgactgaaagccagagtgatggaggcatgatgctgcgctttgtactgcgttctgataccaagctggcgcaactgcgtaaggcgctgccgtggttacacgaacaactaccgcagctgaaagttattaccgtcaatattcagccggtacatatggcgattatggaaggggagacggagatctacctgaccgaacaacaggcactggcggagcgttttaatgacgtaccgctgtggatccgtccgcaaagtttcttccagactaatccggcggtcgccagccagttgtacgccaccgcgcgcgactgggtacgacagctgccggttaaacatatgtgggatctgttctgcggtgtggggggctttggtttacactgcgcgacgcctgacatgcagttaaccgggatcgaaattgcatcagaggccattgcctgtgcaaagcagtcagccgctgaactgggcttaacgcgtttgcaatttcaggcgctggactccactcagtttgccaccgctcagggggatgtgccggagctggtgctggttaacccgccgcgccgcggcattggtaaaccgctgtgtgattatctctcaacgatggcaccgcgttttatcatctactccagctgtaacgcccaaactatggcgaaagatatccgcgaactgcctgggtttcgtattgaacgggtgcagcttttcgatatgttcccgcataccgcgcactatgaagtgctgacgctgctggtgaagcaataaaaaagccgcatgtgcggcttcagattgctgacaaagtgcgcgttgtttatgccggatgcggcgtaaacgccttatccggcctacaaaagcgtgcaaattcaatacattgcatgggccatgtaggcct

SEQ ID NO: 55 - protein, 158 aa, Escherichia coli
MTSLVVPGLDTLRQWLDDLGMSFFECDNCQALHLPHMQNFDGVFDAKIDLIDNTILFSAMAEVRPSAVLPLAADLSAINASSLTVKAFLDMQDDNLPKLVVCQSLSVMQGVTYEQFAWFVRQSEEQISMVILEANAHQLLLPTDDEGQNNVTENYFLH

SEQ ID NO: 56 - DNA, 10160 bp, Escherichia coli
ttactcacaacttattgaatctgcatgatattgcctgccgggtaaggcgttacgccgcatccggcatcaaatgactcaacgttgtcccgcttctggtttgcgcgatttttgccagtaaaaatgctcgcgcaaaccttccgccgactcttccgccacagcacgcaattcatcgctgtccgcttcatgacgcagctgatgatccacattctttacccacacaaattcatgtcctttgtgccctgccatgagttgtcctgaaaacagagcacacgttaataagacaaccgataacgccttcgtaaacatcctgccacctttttcttaccttttgccgctatgatgccgatcgtttcttgaggttattattcagttttgcaaattagcgcaaagaaattctggaatcttccttcctgattttgcattgcattctgccgttgcggcgatttagtgctattttcgagcaaattacacacggaggtaaacactaatgtttactttgttgatatactcagcggcagggaggcgatgtgaaacaaagcgagttcagacgttggctcgaatctcagggcgtcgatgtagcgaatggcagcaaccatttgaaactcaggtttcatgggaggcgcagtgtcatgccgcgtcacccctgcgatgagattaaagaaccattgcgtaaagcaatcctgaaacaactcggtttgagttaatcgccaattaaaaaggttaatgacatgcgagagacagtcgaaattatgcgttatcccgtcactcttacacccgcgccggaaggcggttatatggtttcttttgtggatatccctgaagcgttgacccagggcgaaactgtcgctgaagcgatggaagcggcaaaagatgctttactgaccgcatttgatttttattttgaagataacgagcttatccctttaccttcgccattaaatagtcacgatcactttattgaagtacctttgagcgtcgcctctaaggtattgctgttaaatgcttttttacagtcagaaatcactcagcaagagttagccaggcgaattggcaaacctaaacaggagattactcgcctatttaacttgcatcatgcgacaaaaatcgacgccgtccagctcgcggcaaaggcgcttggcaaagagttatcgctggtgatggtttaattacagttaacgaaaagttgtcatttttaacaactgatatagactgccgaatcatctgcacataattacgattcgataatgaaaaaataccagcagcttgcagaacaattacgcgagcagattgcgtcgggtatctggcaacccggcgatcgtttgccttcgttgcgtgaccaggtggcgctttcaggcatgagctttatgactgtcagccatgcctatcagttgctcgaaagtcagggatatattatcgcacgaccgcagtcgggttattacgttgcgccacaggcaataaaaatgccgaaagcgccagtcattccagtcactcgagatgaagcagtcgatatcaacacttatatttttgatatgttgcaggccagtcgcgatccgtcggtcgttccgtttgcctcggcctttcccgacccgcgacttttccccctccaacaactaaaccgctcgctggcgcaggtaagcaaaaccgccacagcgatgagcgtgattgaaaacttaccgccaggaaacgcagaactgcgtcaggctattgctcgtcgctatgccttacagggcatcaccatttctcctgatgaaattgtcattactgccggggcgttagaggcattaaacctcagtttgcaagcggtaactgaaccgggcgattgggtgatagtagagaatccttgtttctacggtgcgttgcaggcgctggagcggctacggctgaaggcgttatcggtggcgacggatgttaaagaagggatagatcttcaggcgctggaactggcgttgcaggagtatccggtgaaagcgtgctggctgatgactaatagccagaatccactcggatttaccttaacgccgcaaaaaaaagcacaactggtggcgttgctcaatcagtacaacgtaacgctgattgaagatgacgtttacagcgaactttattttggacgggaaaaaccgctgcctgcgaaagcgtgggatcgccacgatggcgttttgcattgctcttcgttttcgaaatgtctggtgcctggttttcgtattggttgggtcgccgccggaaaacatgcacgtaaaattcaacgcttgcagttgatgagtacgctttccaccagctcaccgatgcaacttgcgctggtggattacctttccacgcgccgatacgacgcccatcttcgtcgcctgcgtcgccagcttgcggaacgtaaacaacgtgcctggcaggcactgctgcgttatctgcctgcggaagtgaaaattcatcataatgacagtggttactttctctggttggagctccccgagccgttagatgccggcgaattaagcctggcggcactgacgcatcatatcagtattgcgccgggtaaaatgttttctaccggtgaaaactggtcacgttttttccgttttaataccgcgtggcagtggggagagcgtgaagaacaggcggtaaaacaattaggcaaacttattcaagaacggctgtaatagcgtttaatttaattcctcttagattgggtaatatgaatttcgaatagcagtcatatttcctaactccttgactatactccagaagataaccttacagacggcataatgcgcggtagctcacaacctgaataaattttctcaggggcgaaggtgtgcctgcaagccgccgtctatggttaaacaaggagatatttttacggcacggcggctgaacaattaattacgacaggagtaagaccttatgagcaagacatttgcccgcagcagcctgtgtgcgctcagcatgacaataatgaccgctcacgccgccgaaccgcctaccaatttagataaaccggaagggcgactggatattatcgcctggccgggatacatcgaacgcggacaaactgataaacaatacgactgggtaacgcagttcgaaaaagagacaggctgcgcggtgaatgtgaaaaccgccgcgacttccgatgaaatggtcagtctgatgaccaaagggggttacgatctggttacggcatccggcgatgcctcgctgcgtttgattatgggtaaacgcgtgcagccgattaataccgcattgattcccaactggaaaacgctcgatccgcgcgtggttaaaggcgactggtttaatgttggcggcaaagtttacggcacaccttaccaatgggggccgaacctgctgatgtacaacactaaaaccttcccgacgccgccggatagctggcaagtggtttttgttgagcaaaatctgccggacggcaagagcaataaaggccgcgttcaggcttatgatggccctatctatattgcggacgctgcgttgttcgttaaagccactcagccgcagttgggcatcagcgatccgtatcaactcaccgaagaacagtaccaggcggtgctgaaagtgctgcgcgctcaacacagtttgatccatcgctactggcatgacactaccgtgcaaatgagcgatttcaaaaacgagggtgtggttgcttccagtgcctggccctatcaggccaacgccctgaaagccgaaggccagcctgttgctaccgttttcccgaaggagggtgttaccggttgggctgataccaccatgctgcatagcgaagcgaaacatccggtttgcgcctacaaatggatgaactggtcattaacgccaaaagtgcagggcgatgtggcggcctggtttggctcgttaccggtagtgccggaagggtgtaaagccagtccgttattaggcgaaaaaggttgtgaaaccaacggttttaactatttcgacaaaatcgccttctggaaaacgcctatagcagaagggggcaagtttgttccctacagtcgctggacgcaggattacattgccattatgggcggtcgctaacttcgctggggtgctttatgacgtacgcagtggagtttgacaacgtctcgcggttgtacggtgacgtgcgcgcagtagatggcgtcagtattgcgataaaagatggtgagttcttctctatgctggggccgtccggctccggcaaaaccacctgcctgcgcctgattgctggcttcgaacagctttccggcggggctatctctatctttggtaaacccgccagcaatctgccaccgtgggagcgggacgtgaatactgtctttcaggactacgcgctatttccgcatatgtcgattcttgacaatgtcgcctatgggctgatggtcaaaggcgtgaataaaaagcagcggcacgcaatggcgcaagaggcgctggagaaagtggcgttggggtttgtacatcaacgtaaaccgtcacaactttctggtggtcagcgccagcgggttgctatcgccagagcattggtgaatgaaccgcgcgtattgctgttggatgaaccgctcggcgcactggatctcaaattgcgtgagcagatgcagctggaactgaaaaaactgcaacagtctctcggtatcacttttatcttcgttacccacgatcagggcgaagcgttatcgatgtccgatcgtgtggcggttttcaataatggacgcattgagcaggtcgattccccgcgcgatctctatatgcgcccgcgcacgccgtttgttgccgggttcgttggtacatcgaatgtttttgatggactgatggcagagaaactttgtggcatgacgggaagcttcgccctgcgaccggaacatatccgcctcaacacccctggtgaactgcaggccaatggcacgatccaggcggtgcaatatcagggcgcggcaactcgttttgaactgaaattgaacggcggtgaaaaactgcttgtgagtcaggccaatatgacaggcgaagaactgcctgccacgctcacgcccggacaacaggtgatggtttcctggtcgcgtgatgtgatggtgccgctggttgaggagaggtgaatggcgatgaatgtattgcaatcaccttcacgtccaggtctgggtaaggtgtccggtttcttctggcataatccggggctggggctgtttttactgctgcttggcccgctaatgtggtttggcattgtctatttcggctcgctgctgacactgttatggcagggattttatacttttgacgatttcaccatgtcggtaacgccggaactgacgctggcgaatatccgtgcgctgtttaatccggcgaattacgacatcattctccgcacgctgactatggctgtggcagtcactatcgccagcgccattctggcttttccaatggcgtggtatatggcgcgctataccagcgggaaaatgaaagcgtttttttatattgcggtaatgttgccgatgtgggcgagctacattgttaaagcctatgcctggacgttattgctggcaaaagatggcgtggctcagtggtttttacaacatcttgggctggaaccactgctgactgcgttccttacattacctgcggtgggcggaaatacgctgtcaacttccgggctggggcgctttctggtgtttctctatatctggttgccgttcatgatcctgcccgttcaggcggcgcttgagcgtttgccgccgtcattgttgcaggcgtcggctgatctcggcgcacgtccacgacaaacctttcgctatgtggtgctgccgctggcaatcccgggtattgccgctggctctatctttaccttctcactcacactgggcgattttatcgtcccgcagctggttggtcctccaggatattttatcggcaatatggtttattcccagcagggggcgattggcaatatgccgatggcggcggcattcaccctggtgccgattattctcatcgcactgtacctggcgttcgtgaaacgtctgggagcgttcgatgcactctgaacgcgcaccgtttttcctcaaactggcggcctggggcggcgttgttttcctacattttcccatcctgataatcgccgcctatgcgtttaacactgaagatgcggcgtttagttttccaccgcagggcctgacgctgcgctggtttagcgtggcagcacagcgtagtgatattcttgatgccgtgacactgtcacttaaagtggcggcgctggcgacattaattgcgctggtgttagggacgctggcagctgccgcgctgtggcgacgagactttttcggcaaaaacgccatttcgctgttactgctgctgcccattgcgctgccgggcattgtcactggtctggcgttattaaccgcctttaaaaccatcaatctggagccgggatttttcaccatcgtggtcggtcatgcgactttttgtgtagttgtggtgtttaacaatgtcatcgcccgttttcgccgcacctcctggagtctggttgaggcgtcaatggatcttggggccaatggctggcaaaccttccgctacgtagtgttgccgaatctcagttcggcgttactggcaggaggaatgctggcgtttgccttgtcgttcgatgaaatcatcgttacgacctttacggcaggtcatgaacgaacgttaccgttgtggttgctcaatcagcttgggcgaccgcgtgatgtaccggtaactaacgtggtggcactgctggttatgttggtaacaaccttgccgatcctgggggcctggtggctaacccgcgaaggcgacaatggtcaataaccactgatacaggaatatgctatgcaacataagttactgattaacggagaactggttagcggcgaaggggaaaaacagcctgtctataatccggcaacgggggacgttttactggaaattgccgaggcatccgcagagcaggtcgatgctgctgtgcgcgcggcagatgcagcatttgccgaatgggggcaaaccacgccgaaagtgcgtgcggaatgtctgctgaaactggctgatgttatcgaagaaaatggtcaggtttttgccgaactggagtcccgtaattgtggcaaaccgctgcatagtgcgttcaatgatgaaatcccggcgattgtcgatgtttttcgctttttcgcgggtgcggcgcgctgtctgaatggtctggcggcaggtgaatatcttgaaggtcatacttcgatgatccgtcgcgatccgttgggggtcgtggcttctatcgcaccgtggaattatccgctgatgatggccgcgtggaaacttgctccggcgctggcggcagggaactgcgtagtgcttaaaccatcagaaattaccccgctgaccgcgttgaagttggcagagctggcgaaagatatcttcccggcaggcgtgattaacatactgtttggcagaggcaaaacggtgggtgatccgctgaccggtcatcccaaagtgcggatggtgtcgctgacgggctctatcgccaccggcgagcacatcatcagccataccgcgtcgtccattaagcgtactcatatggaacttggtggcaaagcgccagtgattgtttttgatgatgcggatattgaagcagtggtcgaaggtgtacgtacatttggctattacaatgctggacaggattgtactgcggcttgtcggatctacgcgcaaaaaggcatttacgatacgctggtggaaaaactgggtgctgcggtggcaacgttaaaatctggtgcgccagatgacgagtctacggagcttggacctttaagctcgctggcgcatctcgaacgcgtcggcaaggcagtagaagaggcgaaagcgacagggcacatcaaagtgatcactggcggtgaaaagcgcaagggtaatggctattactatgcgccgacgctgctggctggcgcattacaggacgatgccatcgtgcaaaaagaggtatttggtccagtagtgagtgttacgcccttcgacaacgaagaacaggtggtgaactgggcgaatgacagccagtacggacttgcatcttcggtatggacgaaagatgtgggcagggcgcatcgcgtcagcgcacggctgcaatatggttgtacctgggtcaatacccatttcatgctggtaagtgaaatgccgcacggtgggcagaaactttctggttacggcaaggatatgtcactttatgggctggaggattacaccgtcgtccgccacgtcatggttaaacattaaggataatattgcagatcgtaagagtatgagatgatcttgcgtactgtcagagcactgatttctctgacagtacgtgctgcgtgcaaaatcactacatcaaataaaccagccaaatctcatagagataagagtaaacaaaccaacagcagcaaagaaatttatcagtactacagttctactggaaacattcatttttgccaccttttatcattgcccctatgtgtatagtacgggttaagaaaatccgcaataatactcattctgaagatggataagggcaagttgctgtttgatgattttttctcaaactggtgaaaaaacttgatgcacgtcaaaaaatgacgcatatttgcgcgcgttttattcatctggctggacgcccgtacatgtctctctatcaacacatgcttgttttttatgcggttatggcagcaatcgcatttcttatcacctggtttctttctcacgataagaaacgcatccgtttcttaagcgcctttctggtgggggcaacatggccgatgagtttcccggtggcgctgttgttttcactgttttaaatcttactcactggcttgacggcaccacgcagacttatatcatttggatgaatcgataaatttcacaagtggctaaggagaaagtatgtcgcatctggatgaagtcatcgcgcgcgtggatgccgcgattgaagagagcgtcattgcccatatgaacgaattattaatcgccctgagcgatgacgcggagttaagtcgggaagatcgctacacccagcagcaacgtctgcgcacagcgatcgcccatcacggtcgcaagcataaagaagatatggaagcgcgccacgaacagttaaccaaaggcggcaccatcctctgattaaaatgagcgtctggctaccaaccaggcgccaaccacaagtaaaattgcgccacaaattgggccgaacaacgcccgtagtggtacgccatgactgcggaagatatccagcatcagaccgccaatcagctgactggcgaccagtacagcaatagttgtcgccgctcccacattctgatatccgctgatactggcgaagacaaaaaacgatcccagcaagccaggtataagtgtccaccagcgcacgctggacaccagttcgccaaaccccgccatgccttgtttaaaccataaaatagaaacaaagagcacaatccccaccagtgagttcagcaacatggcgatgagaatggtagaggaggtctgggtgatgcgcaccatcagcgtgttctggacaaccagaccaattccggcggcaatcaaaaaagcaagggtgagcgactgattcatccaatcgcgtccggttcagtgcgctcgtcgagttgcaactgcataaatgtcagatccagccaacgaccaaatttagtgcctacctgcggcatttgcgcggtgacgacaaatcccagcgactggtggagatgcagcgaggcctgattttgcgattcgatcccggcgaccatgacatgcttcccgcaatcccgcgcttcatcaatcaatcggcttaacaatttacgccccagacctttgccctgatgatcgggatggacataaaccgaatgttccacggtatggcgaaaaccatcgaaactacgccagtcgccaaacgaggcatatcccgtcactacgccgttttcctcgctcaccagcactggataacctgctaaagtccgcgcttcaaaccaggcaatgcggttatcagcatccaccgtttggtcattccagatagccgccgtatacaacacggcgtggttataaatttccgcaatggcagcacagtcggctttgcgggcaaaacggatggacatgtctggcctcaataaaataatgatgatgatgttatcaatactatcgaaaacagcccgaagcaacggattcct

SEQ ID NO: 57 - protein, 172 aa, Escherichia coli
  complement of position 9570-10088 of seq id 56
MSIRFARKADCAAIAEIYNHAVLYTAAIWNDQTVDADNRIAWFEARTLAGYPVLVSEENGVVTGYASFGDWRSFDGFRHTVEHSVYVHPDHQGKGLGRKLLSRLIDEARDCGKHVMVAGIESQNQASLHLHQSLGFVVTAQMPQVGTKFGRWLDLTFMQLQLDERTEPDAIG

SEQ ID NO: 58 - DNA, 10614 bp, Escherichia coli
ccggttcgcggcctttccagcaggttgtattaccgtagtaatgcaagcgcgtctcagcggagacaatactcgccagtaactctctttttgtcaagcaaaagagagttattattgttctgttagtgtattatccactgcggccctttccgccgtctcgcaaacgggcgctggctttaggaaaggatgttccgtggccgtaaatgcaggtgtttcacagcgcttgctatcgcggcaatatcgccagtggtgctgtcgtgatgcggtcttcgcatggaccgcacaatgaagatacggtgcttttgtatcgtacttattgtttctggtgcgctgttaaccgaggtaaataataaccggagtctctccggcgacaatttactggtggttaacaaccttcagagcagcaagtaagcccgaatgccgccctttgggcggcatattttagattatccgattctgtttaaagtcacgcaaaaaaccaccccagcgacgttcatagaatggcgcaatatgttcggtaataaagtggctaattcctttttccccttttttcacctgacaaatatcgattggttcatcgccaggtaatgtatcggtcgctacacttcccgtcgcctgaataatttcttcgatatcaccatcggcttcaatgccaataagtaaattaggctgtgcctcttcgttctctttaattgaacaaataaaagcacgcttcaccggcttaatggttttaaataaggtggtgagtgaatcaatcatttgtgctggcggctctgcgacttccgataatatcagcgattcaccgccttccaggatttcctggctgctcagcggatttccctcttcaccaatcaacaaactgatttcacgcggcataaattctttaccggttggcagtttggcattaaggaagagcgtttcgccaagtgtcatctcaaacagcgtgcgaacgggcattacgacaaatgcctgttcgtcttcaaccgcctgttgaagtgcttctaacgaggtgaaaaaaggaatgacgctggtgccgtcttctttttcccagtgctgtaaatcaagcgcgctatcttcaaccacagcctcgccctgcgccgccgtaccaggcacccagacggtggattccagtagagtacggaaaaaggccgggcggtgcgccggttcagttgctgctttttccagcaggtcttcaagttcgttttttgtttcggacataagaaccacaattcattcaacgttcggggcgcaaatgcctgatgcgctacgcttatcaggcctacaagggattcgcaatttgttgaatttgcagaatttgtaggccggataaggcgtttacgccgcatccggcatattagtttacgccgttaacagattagctatcgtgcgcacaccaagtcccgtagcgcccgcagaccactgttcaaccggcgctttacggtaagtcgccgagcagtcgatatgcagccagccttgctgatagttctcaacaaagtgcgacaggaagcccgccgccgtgctcgcgcctgccggatacgccgcgcttccggtattgttcagttcggcaaagttagacggcagctggctgcggtggaactccgccagcggcagacgccagaacggttcgttctcctgcgcggcactcgccagcaagcgaccggccagcgcatcgtcaaaactgaacagcgcgtgataatcattacccagcgcagttttcgccgccccggtgagggtcgccgcatcaatgatcatttccggtttctgcgcactggcatcaatcagaccatcggcaagcaccagacgcccttcggcatcagtgttcatcacttcaacttttttaccgttgcgataggtgatgatatcgcccagcttgaacgcattgccgctaatcaggttatccgcacagcagaggaacagcttcacgcgcttgttcagtccgcgcgtaatggcaaatgccagcgccccggtaaccgttgccgcgccgcccatgtccgacttcatcgagtccataaacgcagtctgtttgatgctgtagccgccggagtcaaaagtgatacctttacctaccaggcacgcgtacactggcgcttctttatcgccagttgggttgtaatccagcgccagcaataccggagaacgttctgaaccgcgtccgactgtgtgcagccccatataaccttgctcacgcagatcttcgcctttggtgatccgataagtcacacgatcgcccgcgacgttgctgatcagatcaacagcacgctgtgccagttgcgatggtcccaattcttctgccggtgcgttgatggtgtcacgcacccagtcgatgatcatcaggcggttatccagttcctggcgctgggcatcgtccagatccggccacaccactttacgcgtgcctttcggggctttgtaaccttgccagaatgcccagcagcgatccgcatcccagccttcaccgcttaactgaacatgcttgatgcccagaccgtcaatcttgcgcgccgcacgctggatcagccccagatcgtctgccccgttcaaatgcagggtaatgccgtcattattaatgctgtaagttgctttttctccccagcgcgcgtcggcaggttgggtagagagggtaatcttcatcgcttctgtcattttagttatccttctttgtaaaagggccgccagttggcagccccaggatttttccgctaaatgattcgcgttgcaggaaggcggcaagtgagtgaagccccaggagcatagataactatgtgactggggtgaacgagcgcagccaacgcatctgcggcgtgaagcatgacgcggaaattattcggcctcgtccagccagactaacaaaatcgcttcgaggattttctcgttggatgcctgcgggtcgtcgtcgaaatcttccagatcgcaaatccactgatgcatatcggtgaatcgaaccgttttcggatcaagatcgggatacgcatcgtacagtgcttcgccaatttcgcggctatcggtccacttaagtcccatactaacctctgttaatgctcacgcgcatggttgatagtgtaacgcgggatttcgactactaaatcttcgtcggtaacgcgcgcctggcagcttaaacggctttccggctccagtccccaggctttgtccagcatgtcgtcttcctgctctgagctttccggcagtgagtcaaaaccttcacgaacgatgcagtggcaggtggtgcaagcacaggatttttcacaggcgtgttcaatctcgataccgttacgcagagctgcgtcgagaatggtttcaccgctattagcttccagaacagcgccatcagggcagagatcctgatgaggcaaaataacaatctttggcatattaaacctcgtccacggaatggcctttcagcgcacgacgaaccgactggtccatgcggcgagcggcgaaatcctgggtttgtttgtctacgtttttaatcgcttgttcgatggcgtcaacatcatcgccctgcgccacttcactcaggtgagcggcagcatcgtcaatgacctgacgttctgcggcgcttaacagcgcggcatcagcagccagcgcgccgtgcagactttccagcacacgcgccgcttctactttttgttctgccagcattcgggcttttacgtcctgctcggcatagctcattgagtctttgatcatcgaagcgatttcgctatcggtcagaccgtaagacggtttgacctgaatagacgcctcaacgccggtggatttctccatcgccgtcacgctcaaaagaccgtcggcatcgacctggaacgtcacgcgaatatgcgcaccgccagccggtagcgccggaataccacgcagcgcaaaacgcgccagtgagcggcagtcctgcaccagttcgcgctcaccctgcattacatggatagacatcgccgtctgaccatctttaaaggtggtgaaatcctgagcgcgggccaccggaatagtggtattacgcggaatcactttctccaccaggccgcccatcgtttcgaggcccagcgacagtgggatcacatcaagcaacagcatttcgctgtctggcttgttacccaccagaatatccgcctgaatcgccgcgccaatagcgacgactttatccgggtcgatggaagtcagcggtggacgaccgaaaaattcgcctacccgttcacgcaccagcggcacgcgagtagaaccgcccaccatcaccacttccagcacttcatcagcttctacacccgcgtctttcagcgcgcgacgacaagccagtaaggttcgttttaccagtggcgcgatcagttcattgaattgttcacggctgatttcgccctgccagcccgcaacgttaacggtcacggagtccgcatcgctcagcgcgattttggctgcaatggcggcatccagcagttcacgctgaacgcggttatcgctacgatcaggaatgcccgcctgctcgcgaatgtaatccgccagcagatggtcgaaatcatcgccgccgagcgcggaatcaccgccggttgccagcacttcaaacacgccgcgacttaagcgcagaatggaaatatcaaacgtcccgccaccgaggtcataaacggcgatcacgccttcctgaccggaatccagcccgtaggcgatagccgcagcggtcggttcgttaagtaagcgcaggacgtgaaggcccgccagacgcgccgcgtctttggtgccctgacgctgggcatcgtcaaagtacgccggaacggtgataactacaccatccagctcgcctgccagggcttcagttgcccgcgccgccagtgctttgaggatgtccgcagaaacgcgcaccgggttcagcagccccgccgccgtttcaatcatcggcaggccgttttcgctggcctggaattgataaggcagatgcggatagcgttgctggatatcagccagcgagcgtcccatcaggcgtttaacagaactaattgtgttggcggtatcgagcgctgcattagtacgcgcgtcataacccaccgaatgcccttgctgttgatagtgaacaacagatggcagcaggtgacggccttcatgatcggctaacgtttcggcctgaccgctgcgcactgtcgccaccagcgagttggttgtgcccaggtcaataccggccgccagacgacgctgatgcggcgcagcactcaaaccaggttcactaatttgtaataaggccatgtttagcttccagaaattaaaaatcgagcagtttttcttcgagttgttcggcactgcttcgcagtttatcgagaaaacgcagcttacgcacggtatccgccgccgcgtcccacgtctcgttgtctaactgttcaaccatcaactgatggcgggtatcaaacatctttttcacacgtttgataaagctttccagccgcgcttcatctttcgcctgttcgatctcgtccagctcttcgcgcagctccaactgttccatcaggaacgcggtgtcgcgcacagtatgctgctcgctggcgagatcaaagccgtgcaaagaaagcaaatattccgcgcgcattaacggatgacgcagcgtttgccaggcctggttaatggttgcagattgctgtacggcggcgagttgttccgcctggcttccgctggcgaatttatcaggatgatactgacgttgtagatcctgaaaacgcaggctcagcgcctgggtatcgagttgatagcgggcaggcaagccaaagagggtgaagtaatccataacattctcagggctgcgatccgccgcgataacggcgaatcaggtaaaacaaaccccacgcgcaggcgaccacggtggggttatcggtatgcgcatcaaacgtggaagctttcgccgcaaccacactcatctttgacgttcgggttggtgaatttaaacccttcgttcaggccttcttttacgaagtccagctgcgtaccgtccagaaattgcaggctcttgccatcgaccacgactttcacgcctttgtcttcaaacacgatgtcttccggcgtcggttcgtcaacaaattccagtacataagccatacctgaacacccggaggttctcacgcccagacgcaggccaaaccctttaccgcggttagccagaaaggtatttactcgcgctgctgcactgtcgctcagtgtaatcgacataaccaaacctcaactcttattttgcttcacgtttgcttttatagtccgcaatggcggctttgatcgcgtcttctgccagaatagaacagtgaattttcaccggcggcagttcaagttcttcagcaatatcggtgtttttgatcgcctgcgcttcgtcgagagacttccctttcacccattcggtgaccagggagctggaagcgatagcggaaccgcagccgtaagttttaaaacgcgcgtcttcaatgataccttcatcgttgactttaatctgcaacttcatcacgtcgccacaggccggtgcccccaccatgccgctgccgacgttctcgtcgttgttgtcaaaggaacccacgttacgcggattctcgtaatggtcgataactttttcgctgtaagccattataaattctcctgattccgataccgattaatgatgagcccattcgatgctgttcagatccacgccctgcttgtacatttcccacagcggagaaaggtcacgcagacgaccgatggatttacgaactaactcgatggtgtagtcgatctcttcttcagtagtaaaacgacctaaagagaaacggatagagctatgtgccagctcgtcgttcagccccagcgcgcgcagcacgtaggacggttcgaggcttgctgacgtacaggcggaacctgaagaaactgcgaggtctttcagcgccataatcagcgactcaccttcaacgtagttgaagctgacgttgagaatgttcggcgcaccgtgttccaggtcaccgttcaggtaaacttcttcgatatctttgatgccgttccacagacggttacgcaggccgcgcagacgttccatctcggtcgccatctcttcttttgcgatgcgataggcctcgcccattccgacgatctggtgaacaggcagagtgccggaacgcataccgcgctcgtgaccgccgccgtgcatttgcgcttcgatgcgtacgcgcggtttacgacgtacatacagcgcaccgatacctttcgggccatagattttgtgaccggagaaagacatcaggtcaactttcaactggctcaggtcgataggcagtttacccacgctctgggttgcatcaacgtgatagataatgccacgagcacggcacatttcgccgatagccgcgatatcctgcaccacgccgatttcgttatttacgtgcatgatggacacgaggatggtgtcgtcacgcatcgctgcttcaagttctttcaggtcgataatgccgttacgctgcggtgccaggtaggtgacttcaaaaccttcgcgctccagctgacggcaggtatccagtaccgctttgtgttcggttttgctggtgatgatgtgcttgccttttttctgataaaagttggctgcacctttgatcgccaggttgtcagattcggttgcaccagaggtaaagacgatttcacgcggatcagcgccgaccagatcggcaatctgattacgggcgatatctaccgcttcttcagcctgccagccgaaacggtgagaacgggaggccgggttaccaaaggttccgtccatcgtcataaactgcatcattttctcggcaacacgcgggtccaccggcgtggttgcggagtagtcgagataaatcggtaatttcattgctctataaactccgtacatcactcaatgcaaggaatcaggctaccggctggatgtacgaccgtgtttacggagtatttagcactccggcctgattctgaattctttttattaagcgcgtaacttaacgtcgatcgcgtcttgtgtgcgggtgcgtggcgcgtcgtgagtatgctgacgaccagacacatccagcacttcctggttattaaccagttcgcctaaagtaatgttgttgagaaaaccggtgagacggtcgctcaaatcacgccacagcgcgtgggtcaggcatttatcgccgccctggcagccgcctttaccctgacaacgggtggcatctacagattcgtcaacggcgctaattacttcgccaacggcgatgctgctggcatctttgcctaacagataaccaccgcctggtccacgtacgctggaaaccagaccatttttacgcagacgggaaaacagttgttccagataagaaagggaaattccctgacgttcggaaatatcagccaacggtaccgggcccgcttcagagttgagcgcaacgtcaagcattgcggtcacggcatagcgccctttagatgtcagtctcatgtcttacttcacctcaaactcgcccctgcccggggttttttattgtaaaagtgggggtattgcatagcagggtcaagtctgacattcccgagtaaattggtcaactatttacttgactgatttagtcgggtatttaaccttcagtgccatttttttatcgtggcgtttgtacctgttgtcggatgcggcgtgaacgccatatccgccctggggttctgtacactgtaggcctgataagacgcattacgcgtcgcatcaggcaacggctgtcggatgcggcgtgaacgccttatccgacctacggttctgttcactgtaggcctgataagacgcattacgcgtcgcatcaggcaacggctgtcggatgcggcgtgaacgccttatccgacctacggttctgttcactgtaggcctgataagacgcattacgcgtcgcatcaggcaacggctgttattcggccttgttacctttattctgctgctcaatagaagccagaatcccgcgcaggatattcaactcctggctttccgggcgcgcacgggtaaacagacggcgcaatttattcatcacctgccccggatggttttcacggataaaaccggttgccagcagcgtttgttccagatgaccataaaaacgctccagatcatcgaccagcggatacggcgtctcttcatgctcgacctgctcgccgttttcctgagttgccagccaggccatgcgcacttcataggcaataacctgaaccgccatcgccaggttcagcgagctgtattccgggttagccgcaatcgcgacatgataatggcatttctgcaactcttcattggtcaagccgacgcgctcgcgaccaaacaccagcgccaccggggtatttgccgcttcagcgacgcttttcaggccgcattcgcgcgggtcgagcatcggccatggcagcgtgcgggaacgtgcgctggtgcccaccaccaggctacaaccggctaacgcttcgtcgagcgtatcgacgatgtgagcattaccaatcacatcgctggcccctgctgccagggcaatcgcctgggagtcgggtttcaccagtggattaaccagccacagattggttaatcccattgttttcatggcacgggcaacagaacccatattgccggtgtgtgacgtctccaccagcacaattcgaatattttgcagcattgtctttcttcatctaaagattattcacgcatcttatcataaaacgaagacagatgccgatctcgctgctatactctgcgccgttttcccgttctttaacatccagtgagagagaccgatgcatccgatgctgaacatcgccgtgcgcgcagcgcgcaaggcgggtaatttaattgccaaaaactatgaaaccccggacgctgtagaagcgagccagaaaggcagtaacgatttcgtgaccaacgtagataaagctgccgaagcggtgattatcgacacgattcgtaaatcttacccacagcacaccatcatcaccgaagaaagcggtgaacttgaaggtactgatcaggatgttcaatgggttatcgatccactggatggcactaccaactttatcaaacgtctgccgcacttcgcggtatctatcgctgttcgtatcaaaggccgcaccgaagttgctgtggtatacgatcctatgcgtaacgaactgttcaccgccactcgcggtcagggcgcacagctgaacggctaccgactgcgcggcagcaccgctcgcgatctcgacggtactattctggcgaccggcttcccgttcaaagcaaaacagtacgccactacctacatcaacatcgtcggcaaactgttcaacgaatgtgcagacttccgtcgtaccggttctgcggcgctggatctggcttacgtcgctgcgggtcgtgttgacggtttctttgaaatcggtctgcgcccgtgggacttcgccgcaggcgagctgctggttcgtgaagcgggcggcatcgtcagcgacttcaccggtggtcataactacatgctgaccggtaacatcgttgctggtaacccgcgcgttgttaaagccatgctggcgaacatgcgtgacgagttaagcgacgctctgaagcgttaatgactcaggcgggtgatatcactcacccgccctcgcctttcaggcgctattccgaaatacttcctcactgctttactttctttcgtc

SEQ ID NO: 59 - protein, 412 aa, Escherichia coli
  complement of position 6599-7837 of seq id 58
MMYGVYRAMKLPIYLDYSATTPVDPRVAEKMMQFMTMDGTFGNPASRSHRFGWQAEEAVDIARNQIADLVGADPREIVFTSGATESDNLAIKGAANFYQKKGKHIITSKTEHKAVLDTCRQLEREGFEVTYLAPQRNGIIDLKELEAAMRDDTILVSIMHVNNEIGVVQDIAAIGEMCRARGIIYHVDATQSVGKLPIDLSQLKVDLMSFSGHKIYGPKGIGALYVRRKPRVRIEAQMHGGGHERGMRSGTLPVHQIVGMGEAYRIAKEEMATEMERLRGLRNRLWNGIKDIEEVYLNGDLEHGAPNILNVSFNYVEGESLIMALKDLAVSSGSACTSASLEPSYVLRALGLNDELAHSSIRFSLGRFTTEEEIDYTIELVRKSIGRLRDLSPLWEMYKQGVDLNSIEWAHH

SEQ ID NO: 60 - DNA, 12144 bp, Escherichia coli
  CDS (8854)..(9402)
ctgtttctctgtttgaacgatgactaaatagtgactgcgaaaatgagataagccgttctcaaggcgtcctgcgccccaaattcgtgggaatttattttactaattcagatgatcaaatttactttaaaaggagtgaagggatgtctgatataaaccatgcaggttctgaccttatatttgaactggaggatcgccctccctttcatcaggctctcgttggtgccattacccatctgttggcaattttcgttccgatggtaacccccgcgttaatcgtgggtgcggccttacagctttccgctgaaacaactgcctatcttgtttctatggcgatgatcgcctctggtattggtacctggttacaagtaaaccgctacggcatcgtcggttctggcctactctcaattcagtcagtcaatttttcatttgttacggtcatgattgcgctgggcagcagcatgaaaagcgacggttttcacgaagagttaatcatgtcgtcgcttctcggcgtctccttcgttggcgcatttctggttgtcggatcttcatttatcttgccctatttacgtcgggttattacgcctaccgtcagcggtattgtggtactgatgatcggcttaagcctgattaaagtcggcattatcgattttggtggaggatttgcagccaaaagcagcggtacgttcggcaattacgaacatctcggcgttggtttattggttttaattgtggtgatcggctttaactgctgtcgcagtccgttgctacgcatgggagggatcgccattgggctatgtgtcggctatatcgcatcgttatgcctgggcatggtggatttcagcagtatgcgcaatttgccgttaatcaccatcccgcatccgttcaaatacggctttagttttagcttccatcagttcctggtggttggcacgatttatctgcttagcgtgctggaagcagtcggcgatatcaccgccacggcaatggtttcccgccgccccattcagggggaagagtatcagtcccggctgaaaggcggcgtgctggcagatggtctggtttctgttatcgcctccgctgtcggttcattaccattaaccacgtttgcgcaaaataatggggttattcagatgactggcgtcgcttcacgttatgtcgggcgaaccatcgcggtaatgctggttatcctcggcttatttccgatgattggcggcttcttcacgaccattccctcggcagttctgggaggcgcaatgacgttgatgttttccatgattgccatcgcagggattcgcatcatcatcaccaacggtttaaagcgccgtgaaacacttattgtcgccacttctttaggtttagggcttggcgtctcctacgatcccgaaatttttaaaatattgccagcctctatttatgtattagttgaaaaccctatttgtgctggcgggttaactgcgattttattaaatattatcctccctggtggctaccgacaggaaaacgttctgcctggtattacctcagcggaagagatggattaacagtaaaggagtcaatgatgtcaggagaacacacgttaaaagcggtacgaggcagttttattgatgtcacccgtacgatcgataacccggaagagattgcctctgcgctgcggtttattgaggatggtttattactcattaaacagggaaaagtggaatggtttggcgaatgggaaaacggaaagcatcaaattcctgacaccattcgcgtgcgcgactatcgcggcaaactgatagtaccgggctttgtcgatacacatatccattatccgcaaagtgaaatggtgggggcctatggtgagcaattgctggagtggttgaataaacacaccttccctactgaacgtcgttatgaggatttagagtacgcccgcgaaatgtcggcgttcttcatcaagcagcttttacgtaacggaaccaccacggcgctggtgtttggcactgttcatccgcaatctgttgatgcgctgtttgaagccgccagtcatatcaatatgcgtatgattgccggtaaggtgatgatggaccgcaacgcaccggattatctgctcgacactgccgaaagcagctatcaccaaagcaaagaactgatcgaacgctggcacaaaaatggtcgtctgctatatgcgattacgccacgcttcgccccgacctcatctcctgaacagatggcgatggcgcaacgcctgaaagaagaatatccggatacgtgggtacatacccatctctgtgaaaacaaagatgaaattgcctgggtgaaatcgctttatcctgaccatgatggttatctggatgtttaccatcagtacggcctgaccggtaaaaactgtgtctttgctcactgcgtccatctcgaagaaaaagagtgggatcgtctcagcgaaaccaaatccagcattgctttctgtccgacctccaacctttacctcggcagcggcttattcaacttgaaaaaagcatggcagaagaaagttaaagtgggcatgggaacggatatcggtgccggaaccactttcaacatgctgcaaacgctgaacgaagcctacaaagtattgcaattacaaggctatcgcctctcggcatatgaagcgttttacctggccacgctcggcggagcgaaatctctgggccttgacgatttgattggcaactttttacctggcaaagaggctgatttcgtggtgatggaacccaccgccactccgctacagcagctgcgctatgacaactctgtttctttagtcgacaaattgttcgtgatgatgacgttgggcgatgaccgttcgatctaccgcacctacgttgatggtcgtctggtgtacgaacgcaactaataataaaactttaacatcctcgtgaggacatcattatgtctggagacatcctacaaacaccggacgcaccaaagccacagggcgcgctggataattattttaaaattaccgctcgtggcagtaccgttcgtcaggaagtactggctggcttaacgacctttctggccatggtttattccgttatcgtcgttccgggaatgctgggcaaagcaggttttcctcccgcagctgtgtttgttgccacctgtctggtcgcgggcttcggctcgttgctgatgggattatgggctaatttgccaatggcgattggttgcgcgatttccttgacggcgtttaccgcattcagtctggtactcgggcaacaaattagcgttcctgtcgcactgggcgcggtatttctgatgggcgtcatcttcaccgccatttccgtaaccggtgtgcgtacctggatcttacgtaatttgccgatgggtatcgctcacggtacaggtatcggtatcgggctgtttctgctgctgattgctgctaacggtgtgggtatggttatcaaaaacccgattgaaggcttgcagtggcgctcggtgcgtttacctccttcccggtgatgatgagcttgctggggctggcggtcatcttcggcctggagaagtgtcgcgtacccggcgggatcttgttggtgattattgcaatttcgatcatcggcttaatctttgacccagcggtgaaataccacggtctggtggcgatgccaagcctgactggcgaagatggtaagtctctgattttcagcctcgatattatgggtgcactccagccaactgtacttccgagtgtactggcattggtgatgaccgcagtgttcgacgctactggcaccatccgtgccgtcgccggtcaggcgaatttgttggataaagacaaccagatcatcaacggcggcaaagccctgaccagtgactcagtaagttcaatattctccggcctggtgggcgcagcgcccgcagcggtttatatcgaatcagcggcaggaaccgccgccgggggtaaaacaggtttaaccgcaaccgtagtgggggcgttattcctgttaattctgtttttatcaccgctgtcatttttgatccctggttacgccactgcacccgctctgatgtacgtaggtttgctgatgttaagtaacgtctcgaagctggatttcaatgattttattgacgctatggctggcctggtgtgtgccgtgttcatcgttctgacttgtaatatcgttaccggtattatgctgggctttgtgacactggtcgtaggccgcgtctttgcacgcgaatggcaaaagctgaatattggtacggtgatcattactgccgcactggtcgcattttacgcgggtggttgggcaatctaatagattctccgcgcctttcagcgcggagatttctttcagagaggattctcaccgctggcaacaatacgctgctggcggactcgcctgagttctctttcagtaagcaactgcagcgcctgtgttgggcaagattcaacgcaggctggcccctcttcccgctgttcacagagatcgcatttcacaatttgttgtcgggtatcccccggcaacgactgaatggtgatcattccaaacgggcacgcactgacgcaactctgacagccaatacaacgggcagaattggtctgcaccacctgctcgcccatcgtcagcgcccccacggggcaagcgccaacacaaggggcgttttcacactgatggcacatcaccggcgcactgatgctgtccagtcgctgtaccttcagccggggtaaaaagacatcggcattcaactcctgttctgaagggtgagcgaccacacaggctacttcacaagtacggcagccaatacagtcagccggattaacgataattaacgatttcatcacgatgccttcgtatcaaacagagttaacatatcgcgcgccgcctgccttcctgcggccattgcagtgacaaccagatccgcgccatgaactgcatcaccaccagcaaagacttttttcagatgcgtctgggtaggtaaatacccgacgtcaccggtttgaatcaggccccatttatcgagtttaattccgctgccctgcaaccacggcatggcatgcgcctggaaaccaaaggccataatcagaacatcggcgggcaattcaaactctgaacccgctaccggacgaggacgacggcgaccatccggccccggctcacccatggcggtacgaatcaggcccaccgcagttaaacgcccatcttcgtcacaagcgatatattgcggttgaacattgaactgaaactcgacaccttcctcgcgcgcattaaccacctctttgcgcgagcccggcatactgacttcatcacgacgatacgcgcaggtcacgctggcggcattgaggcggatggaagtccgcaaacaatccattgtcgtatcgccaccgcccaataccacgactcgcttaccttccacgtccgtcagcggatactcttcagactccggcaatcccatgagctggcgggtatgggcagtcaggaacggtagagcctgaatgacaccgggcgcatcttcatgcggcagatctgctcgcatcatcccgtaagtccccacgccgatgaaaactgcatcatattcagaagttaaatcgctaaaggtaatatcgcggccaatttcacagttaagatgaaagtcgattcccattgcggtgaatatctctcgccgctggcttaataccgttttatcgagtttgaaaggaggaatgccaaaagtcagcataccgccaatttctggatggcgatcaaagacatcgacctgaactcctgcgcgcgccagaatatcagcacaccctaaccctgcaggcccagcgccaatcaccgccactttttcgctacggggaacaactttgctgacatcgggacgccagcccatcgccagcgcggtatcggtgatgtagcgttccagattaccgatagagactgcgcccgagtgatctttcaaagtacatgcgccttcacaaagacggtcctgtggacataccctgccgcaaatttctggtaaggaactggtctggtggcaaagttctgccgcttcaataatctttccttcctgtaccagacggatgtaatccggaatagcgttatgcagcgggcaatgccagttgcagttagctttttcggcacaataaacacagcggtcactctcataagtcgcttgttgtggatccagcccgcaatatatttcgccaaagtgggttttccgttcactcgctgaaattttatctgcgcctttacgcgagttaacggggagcaacgctgcactgcgagatggctgagcgtctgatgacgcttttcctgctgccgttttgcgctggcgggccacctttatctgctgcaaccctttatcgtccatcagtcgtaacgcctgtgttgggcaaacttcaatacaggcttgcgtgccggaactgcgctggttacaaaggtcgcatttctgcgcaatcgtatcgaccatctcaacgacgccaaaggggcaagcgattgcgcatcttttacaaccaatacatttttgctcgtccagttgtacgctatcggactggaaagtcagagcattaaccggacaagccgtaacgcaaggggcattgttgcagtgatggcaggccaccggattcgcagcctggcctttccctacaacgtggatacgcggtcgaaagtcactgtgactcagcggccagttttcttgattgtgtgccaccgcacaggcaatttcacaagcatgacagcctatacattccgcagcttcagcagcaataaacttattcatttgcatccctttcatttaatgagttatgtcttctcaaatttcgcgatgcaataaacgggcatatattaggtagcatgaccgttttaattataattttgcgactgagttcaaattattgcccctcaatctatgccgctttcattatttcaacattgccgatcaaaagagcgctatccagataaaaacgattaaatgcgagagtgcgacatgccagaatgattaatgaaatatcaatatgagaaaattacagataattccattgtcaggttctcttctcattttcgtggtttaaccacgattatgtgattgcctccgcaattcctgtctctaactccccttcctcgcaaaaactggcactccacgagcatgtgtttagacagtttcattaacgtaaacggttgctttttactctggcgggcgaaaggagaaacactgatgagcgccatagattcccaacttccctcatcttctgggcaagaccgcccaactgatgaggttgaccgcatattatcaccaggaaagctgatcatactcggtctgcaacacgtccttgtcatgtacgcaggtgcagtcgctgttcctcttatgattggtgaccgactgggcctctcaaaagaagctattgcgatgctcattagctcggatctcttttgctgcgggatcgtcacattattgcaatgtatcggtatcggccgctttatggggatccgcctgccggtgattatgtcggtgacctttgctgctgtaacaccaatgatagccattgggatgaacccggatatcggcctgctggggatatttggtgccactatcgccgcgggttttatcaccacattattagcgccacttatcggtcgcttgatgcctttattcccgccactggttaccggtgtggttattacttctatcgggcttagcatcattcaggtgggtattgactgggccgccggaggtaaagggaatccgcaatatggtaatcccgtttatttaggtatctcctttgccgtcttaatttttatcttgctcattactcgctatgcgaaaggatttatgtccaacgtcgccgtattactggggattgtatttggctttttactttcgtggatgatgaatgaagtcaatttatccgggctacatgatgcttcatggtttgcgattgttacgccgatgtcgtttggtatgccgattttcgatcccgtttccattctgaccatgactgccgtgttaatcatcgtgtttatcgagtcaatggggatgttcctggcactgggtgaaatagtcggtcgtaaactctcttcgcacgatattattcgcgggctgcgtgtcgatggcgtagggacaatgataggcggcacgtttaacagcttcccccacacgtcattttctcaaaacgttggcctggttagcgtgacgcgcgttcatagccgctgggtgtgtatttcttcgggaattatattaatcctgtttggcatggtgccaaaaatggcggtgctggtagcctccattccgcaatttgtgctgggcggcgctggtctagtgatgttcggcatggtactggcgacagggattcgaattctgtcgcgctgtaactacaccaccaaccgttacaacctctatattgtggcgatcagtctcggcgttggcatgactccgacgctctctcacgatttcttttctaagttaccggccgtactgcaaccgctgctacatagcggcattatgctcgcaacccttagcgccgttgtgctgaacgtcttctttaatggctatcagcatcatgctgacctggtgaaggaatccgtctctgataaagatttaaaagtcaggacagtacgtatgtggcttctgatgcgcaagctgaagaaaaatgagcatggagaataatatgaattttttaatgcgcgctatattcagtctgttgttgctttttactctctctattcctgtcatttctgactgtgttgcaatggccattgaaagtcgcttcaaatatatgatgctacttttttaaatggtttttacctgtcggcatccgctcaaaacgggcggttgtcgataaacgctcacttggttaatcatttcactcttcaattatctataatgatgagtgatcagaattacatgtgagaaattatgcaaacggaacacgtcattttattgaatgcacagggagttcccacgggtacgctggaaaagtatgccgcacacacggcagacacccgcttacatctcgcgttctccagttggctgtttaatgccaaaggacaattattagttacccgccgcgcactgagcaaaaaagcatggcctggcgtgtggactaactcggtttgtgggcacccacaactgggagaaagcaacgaagacgcagtgatccgccgttgccgttatgagcttggcgtggaaattacgcctcctgaatctatctatcctgactttcgctaccgcgccaccgatccgagtggcattgtggaaaatgaagtgtgtccggtatttgccgcacgcaccactagtgcgttacagatcaatgatgatgaagtgatggattatcaatggtgtgatttagcagatgtattacacggtattgatgccacgccgtgggcgttcagtccgtggatggtgatgcaggcgacaaatcgcgaagccagaaaacgattatctgcatttacccagcttaaataaaaaaaccccgacatttgccggggttgtgagcataacgtaatgcttattttaccggacgcatcgccgggaacagaataacgtcgcggatggtatggctgttggtgaacagcattaccatacggtcgataccaattcccagacctgctgtcggcggtaagccatgttccagtgcggtgacgtaatcttcatcgtagaacatcgcttcgtcgtcacctgcgtctttcgcggcaacctgatccaggaagcgttgcgcctgatcttccgcgtcattcagctcgctaaagccgttaccgatttcacgaccaccaatgaagaactcaaagcggtctgtgatttccgggttaacgtcgttacgacgcgccagcggagaaacttctgccggatattcagtaatgaaggtcggctgaatcagatgtgcttctgccacttcttcgaagatctcggtaacgatacggcccagaccccagctcttctcaacgtggatgccgatagattcagcaattgctttcgcagagtcgaagttgtccagatccgccatgtcggtttccgggcgatatttcttgatcgcttcacgcatggtcagtttttcgaacggtttaccgaagtccagcgtcacgtcgccgtaggtcacttccgtcttaccgagaatatcctgtgccagagtacggaacagcgattcggtcagctcgatcagatctttgtaatctgcgtaagccatgtagagttccatcatggtgaactctgggttatgacgtacggaaataccttcgttacggaagttacggttgatttcgaatacacgctcgaagccaccaaccaccagacgcttgaggtacagttccggcgcgatacgcaggtacatgtcgagatccagcgcgttatggtgggtgataaacggacgcgcagcggcaccgccagggatcacctgcatcatcggcgtttcaacttccataaagccgcggttcaccatgaactggcgaataccagagaggatctgcgagcgcactttaaaggtgttgcgggattcatcgttggagatgagatcgagataacgctgacgatagcgcgcttcctgatcctgcaagccgtggaatttatccggcagcggacgcagtgctttggtcagcagacgcaactcggtgcagtggatagacagttcgccggttttggttttgaacagcttacctttcgcgccgaggatgtcgccgaggtcccattttttgaactgctcgttataaacgccttccgggagatcgtcacgggcaacgtacagctgaatgcgaccgccaacgtcctgcagggtaacgaaagacgctttacccataatacgacgggtcatcatgcggccagcaacggcgacttcgatgttcagcgcttccagttcttcgttctctttgccgtcgaattctgcgtgcaattggtcagaggtatgatcgcgacggaaatcgttcgggaaggcaatcccctgctcgcgcaggttcgccagcttctcacgacgcgttttcagttcattgttaagatcgactaccgcgtcagcgccctgtgcgtgttgttcagacatgttggttcctcataaccctgctttcaaacttgcttcgataaattgatccaggctgccgtccagcacggcctgcgtgttgcgggtttctaccccggtgcgcagatctttaatgcgggagtcatcaaggacataagaacgaatctggctgccccagccgatgtcggatttgttatcttccatcgcctgtttctcggcatttttcttctgcatctccagttcataaagcttcgctttcatctgcttcatggcctgatctttgttcttgtgctgggaacggtcgttctggcactgggtcacgatcccggtcgggatgtgggtaatacgcaccgcagattcggtacggttaacgtgctgaccgcccgcgccggacgtgcgataaacgtcaatgcgcagatccgccgggttgatttcgatatcaatatcatcatcaacttccggataaacaaacgcggagctgaacgacgtgtggcgacgaccgccggagtcaaacgggcttttacgcaccaggcggtgaacgccggtttctgtacgcagccagccgtaagcgtaatcgccggagattttgatcgtcacggatttaatacccgccacttcaccttccgactcttcgatgatttcagttttgaaaccacgcgattctgcccagcgcagatacatacgctcaagcatgctcgcccagtcctgtgcttccgtaccgccagaccccgcctgaatatcgaggtagcagtcggcgctgtcatattcgccagagaacatacggcggaactcaagctgcgccagtttttcttccagggcgtcgagttcagcaacggcttcgttaaaggtttcttcgtcgtcagcttctacagccagttccagcagaccagaaacatcttccagcccctgtttcatttggtcgagggtgtcgacaacggcttcgagggaggaacgctctttacccagcgcctgtgcgcgttcgggttcgttccagacatccggctgttccagctcggcgtttacttcttccagacgctctttcttggcgtcgtagtcaaagataccccctaagaacgtcggagcgttccgtgaggtcctgaatgcgattatttaccggattaatttcaaacatggtctgatttcttttattgagctagtcaaaatgcggtgataagagcgggattgtacccaatccacgctctttt

SEQ ID NO: 61 - protein, 182 aa, Escherichia coli
MQTEHVILLNAQGVPTGTLEKYAAHTADTRLHLAFSSWLFNAKGQLLVTRRALSKKAWPGVWTNSVCGHPQLGESNEDAVIRRCRYELGVEITPPESIYPDFRYRATDPSGIVENEVCPVFAARTTSALQINDDEVMDYQWCDLADVLHGIDATPWAFSPWMVMQATNREARKRLSAFTQLK

SEQ ID NO: 62 - DNA, 12354 bp, Escherichia coli; identical to SEQ ID NO: 26
  CDS (11183)..(11818)

SEQ ID NO: 63 - protein, 211 aa, Escherichia coli
VTAPFFPRILGAVAFLNQETEPLTMNLQHHFLIAMPALQDPIFRRSVVYICEHNTNGAMGIIVNKPLENLKIEGILEKLKITPEPRDESIRLDKPVMLGGPLAEDRGFILHTPPSNFASSIRISDNTVMTTSRDVLETLGTDKQPSDVLVALGYASWEKGQLEQEILDNAWLTAPADLNILFKTPIADRWREAAKLIGVDILTMPGVAGHA

SEQ ID NO: 64 - DNA, 10864 bp, Escherichia coli
  CDS (8571)..(10769)
gttaaaaaattaatcacctgccaaaagaaataaaaaagagaaagcctccgattaaattatttcgctacactggttccacttttgtgatttacacgggttacccatgaagctgaccatcattcgattagaaaaatttagcgaccaagaccggattgacctgcaaaagatctggccggagtattccccttcctcgttacaggttgacgataaccaccgtatctacgccgcgcgttttaacgagcgcctgctcgctgccgtgcgggtaaccttaagcggcaccgagggagcactggattccctgcgcgtgcgggaagtcacccgccgtcgcggtgtggggcaatatctgctggaagaggttttgcgtaacaatcctggcgtttcatgctggtggatggcggatgcaggcgtggaagatcgcggtgtgatgacggcgtttatgcaggcgctggggtttacggcacaacagggcggctgggagaagtgttaatcgtcaagtttgatttcaaaagtgatattgcctgatgcgctacgcttatcaggcctacaatgtgtgttgcaatttactgatttctttggatcttgtaggccggataaggcgtttacgccgcatccggcatgaagcaacgtactcgatattagcaatttggcggcaacccaaagttgccgattaatgattacttcgcatcggtcgccgtgccgttggcgtgccagtcaaatacgccgaactcaaagcctttcagatcgcctttctcatcccaggtcagcggtcccattacggtatccacggagttcgctttcaggtatttggcgatttcagccggatcgtcagactgattcaggcccgcctgcaaagattgcagcgcggcgtaggtggtccaaacgaatgcgccacttgggtcctgttttttcgctttgatcgcgtcaacaatgggtttgttcgccggaacctgatcgtagttcttcggcttggtcaccagcagcccttccgctgattcgcccgcaatgttagacagcgaaacgttagccacaccttccggccccataaactgagttttcagccctgccgcgcgtgcctgacgcaggatttgccccatttccgggtgataaccgccgtagtaaacgaagtcgatattctcttttttcagacgcgccaccagcgttgagaaatctttttccccggcggtgatgccatcaaagaacaccacgtttgcattgcctttcttcaggccgtcctgcaccgctcgcgccagaccttcgccgtattgctgtttgtcgtgaacgatagcaatacgctgcggtttcactttctcaagaatatatttcgccgccgtcggcccctggtcggagtccaggccggtggtgcgcaggatcagctgatagccacgggcggtcagctccggcgcggttgccgctggggtgatcattaaaatgccttcgtcttcgtagatgtcagacgcaggctgcgttgatgaagaacagaggtgaccaatcacatatttaatgccgtcgttaacgactttgttcgccaccgcaaccgcctgtttcgggtcacaggcatcgtcatattttacgatttgcagtttgttgcctttaatgccgcctttagcgttgatatccgcaaccgcctgctctgcgccggtaaactcctggtcaccgtactgcgcaaccggaccggacattgcgcccacgaccgcgactttaatatcttctgccagagccatattgctgaatgccagcgcgatacatcctgccagtaacgctttaccctttatgttcatcctgagaatccccattcttctggttattacgtgtgttgtgatgttgtttttcagcactttatttcgttttatgcatgactacccgtgctttagcagcatactctgctaaaacatacccgatttttatgatattggaatagctattttgacagtttattaacaatctgcgtggggattggcgttttgccggaggggaaattgattattacagaggcccaaaaaacaaaaaccccggactctcatccagggttctctgcttaatagcggaaattacgcttcaatggcagcacgcaattttttcatcgcgttcttttccagctggcgtacacgctcagcggaaacgccgtaacggtcagccagttcctgcaacgtggacttgttgtcttcgtccagccagcgcgcacggatgatgtcctggctgcgttcgtccagaccctgcatcgcgtcggtcagacggtttgccgcctgctcttcccagttatcatcttcaatgccgtcggcaaagttagatgatttatcctgcagatagagcaccggagccatcggctggctgtcggaatcgtcgtcggaagacaggtcaaaggtcatgtcctgtgccgccatacgtgattccatctcacgtacgtctttgctggttacgcccagttcacgggccaccatttcgacttcatcctggttaaaccagcccagacgctgcttggttttacgcaggttgaagaacagtttgcgctgcgctttggtggtcgcaactttgacgatacgccagttacgcagaacgtattcgtggatctctgctttgatccagtgaacggcgaaggagaccaggcgcacacccacttccgggttgaaacggcgcactgctttcatcaggccgatgttaccttcctgaatcaaatccgcctgtggcaggccatagcccgcataattacgagcaatatgaacaacaaaccgcaggtgagacaggatcagcgttttagctgcttccagatcgccatggtaatgcagcttttcagccagcgcccgctcctcgtcagccgacaacatcggccacgcgttagctgcccggatgtaggaatccaggttgccaactggggctaaagctaaactttgcattttgtcagtcattcaaatcctctcaatcgatatcttctggcgcttcagtggtagcaacaactgtgccagagcttaagagcaacgaggttatcattcactgttttatcagaccgtgattttatccacaagttcaatgcaagcttgtgaataaattacgcacaaaatgtgacatagagatgaaataccgggaagagacaacggggtctctttccctgctacggaacccattgcagggaaagagtataacacgcttttattattcaggcgtaaagtggcgtaaatgttgtaccgtggcaagccacgctgccacccagccaatcatcgagcataccagcagcaatagcaggcattcatcgaatgataagccattgatatcaaacttcgttccgaaaacctgtgccacttccgcaaccgccgatgacaatcgcagcaccagaatttctgacaaaattaatgacaacaatgcgccagaaaatcccagcagtgcgccaccatacaggaacgggcgcaggatgaatccatctgtcgcaccaatcagtttctgtacgttaatggagtcacggcgagcaaagatactcagacgcacactgttaccgatgacgaggaacacggccgccaccatcaacacgccgatcatcgccgaaacgcgcccgaccagcccggtcaacgccgccagacgggcaaaccagctgtcatccatccgcacttcgtcaatgccgttaatctgcgtgatacgatcacgcagcgtattcagtgattccgtcccctggaaatcgagtttcgggatcaccaccgccactgccggaagcgggttttcttccagcatatccagcgcaccaccaaaaccagaccagttacggaactcacccagtgcgtcttcacgagaaagatagttcactttctccacgccttgctcggcctgcaactgtgccaccacgcccgcagcagcgtcatcgtccagcgttttttgcagataaacagtgatttgcggtgacggataatactgcgtcgccgcctggttaacgtttttgtacaccatataacagacgctgggcagcgtcagagaaatggcgataaccatcaccgttaaaaacgtggcgaacggtttgcttttcagatcctgcaatgcgccgtggaaggcatagcgcacctgttcgttgaaaacgttggttttgcgatttaccggttttggcgaggatttcgcgcgttttggtgcgttacgaccgccgtcgcctgagccgccgaccgatttacggaagcgatcaagacgcccgccaaactgccgaatatgattgattgcatcgcgcttattcatggcccacgcctccatgcaagtgaccatcgctcagggtgagcatgcgataggaacgccgcgagatcaggttgatgtcgtgcgttgccatcaatacggttaccccaacgcggttaaactcttcaaacagacgtaaaatgccttccgacagcgcgtcgtccaggttaccagtcggttcgtccgccagcagtaccgcgggcttgttcaccaccgcgcgggcaatgccaacacgctgttgttcaccgcccgaaagctgaatagggaagttcttcgctttgtccagtagcccgactttatccagcgccgccgacacccggcgacgaatatcgtcaccgctggcaccggcgataatcagcgggatcgccacgttatcgtagacagtacggtccatcagtagatggtgatcctggaaaatcatgccaatctggcggcgcagaaacggaacttcacggtttttcagacgcgtgatgtcatggccgctaaaccagattttcccggcgctgggccgctcaatcccacagatcagcttcaggagggtacttttccctgcgccggaatgaccggtcagaaacgccatctcacccggctgcatatggaacgtaacgccctgcagcgcctgtctcccaccgagataagccttgctgacatgttcaaagcgaatcattgttaatcctctcgggcaaaaagtgcctctataaagtcgtccgccttaaacggacgcaaatcctcaatacgttcgccgacaccaatgtagcggatagggataccaaactggtcagccaccgagaaaattaccccgcctttcgccgtgccgtccagtttcgttagcgtgatgccggttaagccaacggcttcatggaacagtttggcctggcttaccgcgttctgcccggtgctggcatcaatagtcagcataacttcatgcggcgcttcaacgtcgagtttcttcatcacgcggacgattttcttcaactcttccatcaggtgcgatttgttctgcaggcgtccggctgtatcggcaatcaggacgtcgatattacgcgctttagctgcctgaatggcgtcgaagataacagaggcggaatccgccccggtatgctgggcaatcaccggaatattgttgcgctgaccccagacctgaagctgttcaaccgcagctgcacggaaagtatcacccgccgccagcatcaccgatttaccctgctgctcaaactgacgcgccagcttaccaatcgtcgtggttttacccacaccgttgacgcccaccatcaggatcacaaacggcgctttgccttcaacattcagcggctcatcgactttcgccagaatctcgcccatctcttctttcagcaggccatagagcgcctcggcgtcacgaagctgcttgcgggatgcgccttccgtcagattggtgataattttacgtgtggtttccacacccacatcggcgatcaaaagctgctcttccagctcctcaaacagatcatcgtcgatttttttaccgcggaacaggctgataaatccggaaccgagattttctttggtttttaacaggctgcgtttcaggcgcgcgaaaaaaccttctttggtcggtttttcctgctcctgagcgatttcttccaccggctgctcttcttctgccggaggaaccaccatcaccgcctcttctgccgcttcggcagccagcgccgtttccagctcttcgtcggtaatttcttctttagccgcttcttcttccgccgcttcgacaatctctacggtttccgcttcagcctgccactcttctggcgaaaccgcttcggcgttgacgtcttccggcaacggcagctcttcacgttcgatagccactggctccggcgtttcttctacgaccggttccggctgtgcaacgacttccgcttcaggctgcgctttttcactttcagcaacctgttcagtgacttccacaacgtcggcagcaaaagtttccgcctcggcttcagtatgcgcttgcggctgctcttcaacggcttgttcagaggccttcacaggctcttgcgcctgaacgatttcttctacaaccggttgttcattctgaacttctgtctctttttccggggtctgctctttttgaccaaagcccagccaggaaaaaaagccacgttttttttctttcgccatttgcgactacactcctcgctgttgcttcatggcacagcgttaacgctatgtacatagcagctaaaaaaatgatgaaatagtctatcacttaacttaattcacatcaccgcctgcaagtatgtgttatctggcggattgagcaatttatcatgaaaaaaccgaatcattccggcagcggccaaatccgcattattggcgggcagtggcgaggccgtaaactcccggttcctgatagcccaggtctgcgccccaccaccgaccgcgtacgcgaaacgttgtttaactggctggctccggtcattgttgacgcccaatgtctggattgcttcgccgggagcggcgcgctggggctggaagcgttatcgcgctacgctgcgggggcaacgttgattgagatggatcgcgcggtttctcagcagttaattaagaatctggcgacactaaaagcaggcaatgcacgcgtggtgaacagcaacgcgatgtcattcctggcgcaaaaaggtacaccgcataatatcgtgtttgtcgatccaccgttccgccgtggcttgttagaagagacgataaatttactggaagataacggctggctggctgacgaagccctgatttatgtcgaaagcgaagtcgaaaacggtctgcccactgttccagcaaactggtcattacatcgggaaaaagtggcgggtcaggtggcttatcggctgtatcaacgcgaagcacaaggagaaagtgatgctgattaatattggtcgtttgttaatgctctgcgtttggggatttttaatcctcaacctggtgcatcccttcccacgcccgctgaatatcttcgttaacgtggcgctgatttttaccgtgctgatgcatggtatgcagctggcgctattgaaatccactttaccgaaagatggcccgcagatgaccaccgccgaaaaggtacggattttccttttcggcgtgtttgaactgctggcctggcagaagaaatttaaagttaaaaaataaccttattgttcgcctacaaagctgacaaagcgcgttcctttatagctcagcgtacctttatcgcccactgtcagggcgtggtactgctgggcgtcgaggcgaaacgtctgctccattcctccgctttgcggtttgaagcttgcctcatagcgtatactggtgcctgccggagtcacttcctgctggcgcgaacggcgatcgttaatcggtttttcccgcttgttgctcaccaccaccagcttttgctggagcggagccatatcattatcagctttttcccgtcgctgttgcataaaacgaaacgatgcggcgacgacaattaagccaatgataacaataaagaaaagaggtggtttgctcatctttatccctcatcggaaaatgcggaaataagcataccctgccagttatggtgttgtcatccgtccaccctcgccactaaactggaagcaagaccgtaggcattccgcttacgaaaaaataacgaattcaaggaactaagatgctttggtcgtttatcgctgtctgtctttccgcatggctatctgtggatgcatcgtatcgtgggccaacctggcaacgctgggtgtttaaaccgttaacccttcttctcctgctgttactggcctggcaagcgccgatgttcgacgccattagctatctggtgctggcagggctgtgcgcctcactgctgggcgatgcgctaaccctgttgccacgtcaacgtctgatgtacgccatcggcgcgtttttcctctcgcacctgctgtacaccatctatttcgccagtcagatgacgctctctttcttctggcctctaccactggtgctgctggttctgggtgcgctgttactggcgattatctggacgcgcctggaagagtaccgttggcctatctgcacgtttatcggcatgacgctggtgatggtgtggctggcaggtgaactgtggttcttccgtccgaccgctccggcgctctctgcgtttgttggcgcttcgttgctgtttatcagtaactttgtctggctggggagccactatcgccgacgcttccgtgcggataacgcgattgctgcggcctgctactttgccggtcacttcctgatcgtccgctcgctgtatctctgataaaacttgactctggagtcgactccagagtgtatccttcggttaatgagaaaaaacttaaccggaggatgccatgtcgactcctgacaatcacggcaagaaagcccctcaatttgctgcgttcaaaccgctaaccacggtacagaacgccaacgactgttgctgcgacggcgcatgttccagcacgccaactctctctgaaaacgtctccggcacccgctatagctggaaagtcagcggcatggactgcgccgcctgtgcgcgcaaggtagaaaatgccgtgcgccagcttgcaggcgtgaatcaggtgcaggtgttgttcgccaccgaaaaactggtggtcgatgccgacaatgacattcgtgcacaagttgaatctgcgctgcaaaaagcaggctattccctgcgcgatgaacaggccgccgaagaaccgcaagcatcacgcctgaaagagaatctgccgctgattacgctaatcgtgatgatggcaatcagctggggtctggagcagttcaatcatccgttcgggcaactggcgtttatcgcgaccacgctggttgggctgtacccgattgctcgtcaggcattacggttgatcaaatccggcagctacttcgccattgaaaccttaatgagcgtagccgctattggtgcactgtttattggcgcaacggctgaagctgcgatggtgttgctgctgtttttgattggtgaacgactggaaggctgggccgccagccgcgcgcgtcagggcgttagcgcgttaatggcgctgaaaccagaaaccgccacgcgcctgcgtaagggtgagcgggaagaggtggcgattaacagcctgcgccctggcgatgtgattgaagtcgccgcaggtgggcgtttgcctgccgacggtaaactgctctcaccgtttgccagttttgatgaaagcgccctgaccggcgaatccattccggtggagcgcgcaacgggcgataaagtccctgctggtgccaccagcgtagaccgtctggtgacgttggaagtgctgtcagaaccgggagccagcgccattgaccggattctgaaactgatcgaagaagccgaagagcgtcgcgctcccattgagcggtttatcgaccgtttcagccgtatctatacgcccgcgattatggccgtcgctctgctggtgacgctggtgccaccgctgctgtttgccgccagctggcaggagtggatttataaagggctgacgctgctgctgattggctgcccgtgtgcgttagttatctcaacgcctgcggcgattacctccgggctggcggcggcagcgcgtcgtggggcgttgattaaaggcggagcggcgctggaacagctgggtcgtgttactcaggtggcgtttgataaaaccggtacgctgaccgtcggtaaaccgcgcgttaccgcgattcatccggcaacgggtattagtgaatctgaactgctgacactggcggcggcggtcgagcaaggcgcgacgcatccactggcgcaagccatcgtacgcgaagcacaggttgctgaactcgccattcccaccgccgaatcacagcgggcgctggtcgggtctggcattgaagcgcaggttaacggtgagcgcgtattgatttgcgctgccgggaaacatcccgctgatgcatttactggtttaattaacgaactggaaagcgccgggcaaacggtagtgctggtagtacgtaacgatgacgtgcttggtgtcattgcgttacaggataccctgcgcgccgatgctgcaactgccatcagtgaactgaacgcgctgggcgtcaaaggggtgatcctcaccggcgataatccacgcgcagcggcggcaattgccggggagctggggctggagtttaaagcgggcctgttgccggaagataaagtcaaagcggtgaccgagctgaatcaacatgcgccgctggcgatggtcggtgacggtattaacgacgcgccagcgatgaaagctgccgccatcgggattgcaatgggtagcggcacagacgtggcgctggaaaccgccgacgcagcattaacccataaccacctgcgcggcctggtgcaaatgattgaactggcacgcgccactcacgccaatatccgccagaacatcactattgcgctggggctgaaagggatcttcctcgtcaccacgctgttagggatgaccgggttgtggctggcagtgctggcagatacgggggcgacggtgctggtgacagcgaatgcgttaagattgttgcgcaggagataaggcaaaccgatcgcaacattgagcgcgatcggtcccctcgcccctctggggagagggttagggtgaggggaaaaggcggcatcgaagccaatcag

SEQ ID NO: 65 - protein, 732 aa, Escherichia coli
MSTPDNHGKKAPQFAAFKPLTTVQNANDCCCDGACSSTPTLSENVSGTRYSWKVSGMDCAACARKVENAVRQLAGVNQVQVLFATEKLVVDADNDIRAQVESALQKAGYSLRDEQAAEEPQASRLKENLPLITLIVMMAISWGLEQFNHPFGQLAFIATTLVGLYPIARQALRLIKSGSYFAIETLMSVAAIGALFIGATAEAAMVLLLFLIGERLEGWAASRARQGVSALMALKPETATRLRKGEREEVAINSLRPGDVIEVAAGGRLPADGKLLSPFASFDESALTGESIPVERATGDKVPAGATSVDRLVTLEVLSEPGASAIDRILKLIEEAEERRAPIERFIDRFSRIYTPAIMAVALLVTLVPPLLFAASWQEWIYKGLTLLLIGCPCALVISTPAAITSGLAAAARRGALIKGGAALEQLGRVTQVAFDKTGTLTVGKPRVTAIHPATGISESELLTLAAAVEQGATHPLAQAIVREAQVAELAIPTAESQRALVGSGIEAQVNGERVLICAAGKHPADAFTGLINELESAGQTVVLVVRNDDVLGVIALQDTLRADAATAISELNALGVKGVILTGDNPRAAAAIAGELGLEFKAGLLPEDKVKAVTELNQHAPLAMVGDGINDAPAMKAAAIGIAMGSGTDVALETADAALTHNHLRGLVQMIELARATHANIRQNITIALGLKGIFLVTTLLGMTGLWLAVLADTGATVLVTANALRLLRRR

SEQ ID NO: 66 - DNA, 10180 bp, Escherichia coli
  CDS (190)..(771)
tgcgagtaagaattatgaggaatggctatcagtattgtcattttcagaaaatatttatcctgcatcggtgagtcagagtaagatcagacttttgctaaattcgcaaaagactttgcacattttgctaatttcaccgtaccgctctgtgacgtactatagtcggcaaacgtctcaccttgaggttaaaaaatgagcaacatcctgattatcaacggcgcgaaaaaattcgcccactccaatggtcaactgaacgacaccctgaccgaagtcgcggatggcacactgcgcgaccttgggcatgatgtccgcatcgttcgcgccgacagcgactacgatgtcaaagcggaagtacaaaactttctctgggctgatgtggtgatctggcagatgccaggctggtggatgggcgcgccgtggacagtgaaaaaatacattgatgatgtattcaccgaaggtcacgggacgctgtatgccagcgatggtcgtacccgcaaagatccgtcgaaaaaatacggttccggcggcctggtacagggcaaaaaatatatgctttctctgacctggaacgcaccaatggaagccttcaccgaaaaagatcagttcttccacggcgttggcgttgacggtgtgtatctgccgttccataaagcaaaccaattcctcggtatggaaccgctgccgacatttatcgctaatgacgtgataaaaatgcctgatgttccccgctatactgaagaatatcgcaagcatcttgtggaaatttttggttaactagagctcaggctttagaaggagttaaccatgcttaccgtaatcgcagaaatccgtactcgtcctggtcaacatcaccgtcaggcggtattggatcagtttgctaaaatcgttccaaccgtactgaaagaagaaggttgccacggctatgcgccaatggtggattgcgcagctggcgtgagtttccagtctatggcaccggattctatcgtgatgattgagcagtgggaaagcatcgcgcatcttgaagcgcatctgcaaaccccgcacatgaaggcgtatagcgaagccgtaaaaggtgacgtgctggagatgaatatccgtattctgcagccagggatttaatcctgccttgtttgcccggccatcctgaccgggcaatgttctttcctttaaacctcaatctccgccatgtcgcctttctcttgcaaccagttgcggcgatcttccgagcgtttcttcgccagcagcatatccatcatcgcgtcagtacgctgatcgtcttcatcatcgatagtcaactgcaccagacggcgagtgttcggatcaagcgtggtttcgcgcaattgcatcgggttcatttcccccagacctttaaaacgctggacgttcggcttgcctttcttgcgttttaattgctcaagtacgccctctttctcttcttccgtcagcgcgtaataaacctctttcccgagatcaatacggtagagcggtggcagtgcgacgtaaacgtgaccgtgtttcaccaacgcgcggaaatgttttacgaacaaagcgcagagcagcgtggcaatgtgcagaccatcagagtccgcatccgcgaggatacagattttgccataacgaagctggctcagatcgtcgctgtcaggatcgataccgatcgctaccgaaatatcgtgcacttcctgcgaagccagcacttcgtcggaagagacttcccaggtgttaaggatcttacctttcagtggcatgatcgcctgatattcgcgatcgcgcgcctgcttggcagatccgcctgcggagtcaccttccacaaggaacagctcggtacggttaaggtcctgcgcggtacaatcagccagtttgccaggcaacgccgggccgctggtcagctttttacgcaccacttttttggccgcacgcatacggcgctgggcgctggaaatcgccatctccgccagcagttcagccgcctgaacgttctggttcagccacaggataaaggcatctttcaccacgccagaaacgaatgccgcgcattgacgcgaagagagacgctctttcgtctgcccggcaaactgcggatcctgcatttttactgacagcacataggcgcagcgatcccagatatcttccgccgacagctttacaccgcgcggcagaatattgcggtattcacagaactcacgcatcgcgtccaacaggccctgacgcagaccattaacatgggtaccgccctgcatcgttgggataaggttgacgtagctttcggtcagcagttcaccgccttccggcagccacagtagcgcccagtccacagcttcagtatcaccagcgaaattaccgataaacggtttttccggcagcgtcggcagaccatttaccgcttccgccaggtaatcattcagaccgtcctgatagcaccagcgttgttcggtattgttgatctcatctttaaaagtgatctcaacgccagggcacaataccgctttggctttcagcacatgcgtcaggcgtgaaacagaaaatcgcgggctgtcaaagaaggtttcatccggccagaagtgcacactggtaccagtattgcgtttaccgcaagtgccgacaacctgtaaatcctgcaccttttcgccattttcaaaggcgatgttataaacctgaccatcgcggcgcacgttaacttctacgcgcttcgacagggcgttaaccaccgaaatccccacgccatgcaggccgccagagaactggtaatttttgttagagaatttaccgcctgcatgcagacggcaaagaatcagttcaaccgccggtacaccctcttccgggtgaatatccaccggcatcccgcgcccatcgtcaataacttctaacgactggtcagcatgtaaaataacgtccacgcgttttgcgtgacccgccagtgcttcatccacactgttatcaatgacttcttgccccaaatggttagggcgagtggtatcggtatacatccccggacggcggcgaaccggctcaagcccggtgagtacctcaatggcatcagcgttataagtttgcgtcatggtttaagttagtaattcgagttgatcgtcagagatggtgcagaccaagaaaatcgacgatcgggttgaaataatcttcgaagcccgtgaatgcgtggttgccgccttctatgacagtctggcggcaggaagcgtagtacgccaccgcctggcggtaatccagcacttcatctcccgtctgttgcagcagccagatcaaatccggcgcttccagcgggtcaatctgcatgactttaagatcgtaaatatggcgtgactctagcacatattgctgcccggtgtaggggttctcgttctgaccgagatagtccgtcagcagttcaaacgggcgcaccgccgggtttaccaccactgcgggcagcataaaacattgtgacaaccaggtggcgtaatatccccccagtgacgaaccgacaatacccagcgaatcaccgccatgttccaggacaatggattccagcagctctgccgcgtcggaaggatacggcggcaactgcggaatgatcatctcaacgtcagggtgatgttccgccagccagttttttaacaagctcgcttttgcagagcgcggcgagctgttgaaaccgtgtaaataaagaagcgtagacatcagtagccttctgaagcggtatcaggttggaaacgtgtgtccgccaggcgatgcacctcggtggtcagcgtgccatcagcatgtaactcgagagtacgccagccgggcgcgatggtatccagcgtaaagttggaacagtgcggcttaaactgcacacaggtcgacggcgttgccagcaggcggcgaccattccagtcgagatccagctcctgatgaatatgaccgcacagcaagtatttgacgtgcggaaacttcgccagcacggtatccagttcgcccgcgttacgcagactgtgttgatcgagccaactacaacccgcaggtagcggatgatgatgcagcagcagcaacgtatggcgttctggcgcatcggccagtttacgttccagccactcaagctgaaactcgctcagctcaccgtgcggcacgccaaacacctggctatccagcaacaggatttgccattgctcaccaataaacacgcgcttcgccggggagatacccgcatcctgtaacgcgctgtacatcgcgggctggaaatcgtggttgcccggcagccagacgcagggcgcacgaaaacttgcgatgccttcagcgaaatgctgataggccgcagaggattgatcctgcgctaaatcacctgtcgcgacaatcaggtcgaattcgtgctggtgtggccgaatcgcctccagcaccgcctggtaactctcccaggtgtttacccctaacagggcttcgtgcttttgtgcaaacaggtgagtgtcggtaatttgtaaaatcctgactctggcctcaccagccagaggaagggttaacaggctttccaaatggtgtccttaggtttcacgacgctaataaaccggaatcgccatcgctccatgtgctaaacagtatcgcaaccagtccgctaaaaactgattaatttgatgcttttcgtcgcgttgatgcaactttttattaggataatcataccgcgctttgaagcgaaaaatctgctggcttgaacacacttcagccaccatcgcgtcatgatacagacgcaccgtcattgacggaaggctccagtaactgatcgcgggcgcagtctgttctattgtcaccagggtagtgtatcgggtcgattccacaatcgtcagccgatattgtgcgtttgccacctgatagcttacagtttcgccgggtgcgtcattgcgcggtaacaaacggcgcaattgtgaaaagttcatctcgcacaggcgcatcatttcaggaaagtcaggtgtgtaacgcttcatttatgcccactcattttttaacgcttgatgatgcagctgcagccattgcaaagcgatgaccgacgctgcgttgtcgattttcccctcttctacccactggtatgcctgttcccggcttaccacatgaacgcgaatatcttcgttttcatcagccagaccgtgaataccgcttgcggtcgtggcgtccacttcgcccaccataattgacgaacgctcactggtgccccccgggcttgccaggaaacttaacaccggtttggtccgtttgactatcagtcccgcctcttcaatcgcttcgcgacgggcaacatcttccacactttcaccctcttcaatcatcccggcaaccatctccagtagccaaggggtttcgctggtgtcgtacgcggcaatccgaatctgctcaatcagcacaacttcatcacgcactgggtcaaagggtagcaagactgcggcgtgaccgcgctcaaaaatttcccgccgcacctcatgactcatttgcccgttgaatagacgatgacgaaatctataaagatctaatgaaaaaaagccgcgataaagtgtttctcgtgcaataatttctacatcgtttttgccaaatgtaacgggcaggttgtctggcttaagcattgttaatgtcctggcactaatagtgaattaaatgtgaatttcagcgacgtttgactgccgtttgagcagtcatgtgttaaattgaggcacattaacgccctatggcacgtaacgccaaccttttgcggtagcggcttctgctagaatccgcaataattttacagtttgatcgcgctaaatactgcttcaccacaaggaatgcaaatgaagaaattgctccccattcttatcggcctgagcctttctgggttcagttcgttgagccaggccgagaacctgatgcaagtttatcagcaagcacgccttagtaacccggaattgcgtaagtctgccgccgatcgtgatgctgcctttgaaaaaattaatgaagcgcgcagtccattactgccacagctaggtttaggtgcagattacacctatagcaacggctaccgcgacgcgaacggcatcaactctaacgcgaccagtgcgtccttgcagttaactcaatccatttttgatatgtcgaaatggcgtgcgttaacgctgcaggaaaaagcagcagggattcaggacgtcacgtatcagaccgatcagcaaaccttgatcctcaacaccgcgaccgcttatttcaacgtgttgaatgctattgacgttctttcctatacacaggcacaaaaagaagcgatctaccgtcaattagatcaaaccacccaacgttttaacgtgggcctggtagcgatcaccgacgtgcagaacgcccgcgcacagtacgataccgtgctggcgaacgaagtgaccgcacgtaataaccttgataacgcggtagagcagctgcgccagatcaccggtaactactatccggaactggctgcgctgaatgtcgaaaactttaaaaccgacaaaccacagccggttaacgcgctgctgaaagaagccgaaaaacgcaacctgtcgctgttacaggcacgcttgagccaggacctggcgcgcgagcaaattcgccaggcgcaggatggtcacttaccgactctggatttaacggcttctaccgggatttctgacacctcttatagcggttcgaaaacccgtggtgccgctggtacccagtatgacgatagcaatatgggccagaacaaagttggcctgagcttctcgctgccgatttatcagggcggaatggttaactcgcaggtgaaacaggcacagtacaactttgtcggtgccagcgagcaactggaaagtgcccatcgtagcgtcgtgcagaccgtgcgttcctccttcaacaacattaatgcatctatcagtagcattaacgcctacaaacaagccgtagtttccgctcaaagctcattagacgcgatggaagcgggctactcggtcggtacgcgtaccattgttgatgtgttggatgcgaccaccacgttgtacaacgccaagcaagagctggcgaatgcgcgttataactacctgattaatcagctgaatattaagtcagctctgggtacgttgaacgagcaggatctgctggcactgaacaatgcgctgagcaaaccggtttccactaatccggaaaacgttgcaccgcaaacgccggaacagaatgctattgctgatggttatgcgcctgatagcccggcaccagtcgttcagcaaacatccgcacgcactaccaccagtaacggtcataaccctttccgtaactgatgacgacgacggggcttcggccccgtctgaacgtaaggcaacgtaaagatacgggttatctgccgcattcttcccccttctcgcttcaatttcgaccagccatcctctattctgatgggtatttaccactggtcccggaagacaaaaatgaaacggacaaaatccatacgccacgcatcgttccgcaaaaactggagcgcacgccatctgacaccagtcgctctcgcggttgccactgtttttatgctggctggctgtgaaaagagtgatgaaacagtgtctctctatcaaaatgctgacgactgttcagctgcaaacccaggcaaaagcgccgaatgtaccaccgcgtacaacaatgcgctgaaagaagccgaacgtactgcgccgaaatacgccacccgtgaagactgtgttgctgaatttggtgaaggtcagtgccagcaggcaccagcccaggctggcatggcaccagaaaaccaggcgcaggcccagcaatccagcgggagtttctggatgccgctgatggccggttacatgatggggcgtctgatgggcggcggcgcgggatttgcacagcagccgctgttctcctcgaaaaacccagccagtccggcttacggtaaatataccgacgcgacgggtaaaaactatggcgcagcccagccaggccgcaccatgaccgtaccgaagacggcaatggcaccaaaaccggcgaccaccactaccgttacccgtggcggttttggtgaatctgttgccaaacaaagcactatgcagcgtagtgcaaccggtacctcttctcgttcaatgggtggctgataccgatggaaagagtcagtattaccgagcgcccggactggcgtgagaaagcccacgaatacggtttcaattttcacaccatgtacggcgagccgtactggtgtgaagatgcttactacaagttgaccctcgcccaggttgaaaagctggaagaagtcaccgccgaactgcaccagatgtgcctgaaagtggtggaaaaagtgatcgccagcgatgagctgatgaccaaattccgcattccaaaacacacctggagttttgtgcgccagtcatggctgacgcaccagccatcgctttattcgcgtcttgatctggcgtgggatggcactggtgaacctaaacttctggaaaataacgccgatacgccaacgtcactatacgaggcggcgttctttcagtggatctggctggaagatcagcttaacgccggtaacttgccggagggcagcgaccagtttaacagtctgcaagaaaaactgatcgatcgcttcgttgagctgcgtgaacagtatggcttccagttgctgcatctcacctgctgtcgcgacacggtggaagatcgcggaaccattcagtatttgcaggactgcgcaacggaagctgaaattgctactgagttcctctacatcgatgatatcgggttaggtgaaaaaggtcagttcacggatttacaggatcaggtaatttccaacctgttcaaactgtatccgtgggaatttatgttgcgtgagatgttctcaaccaagctggaggatgcaggcgtacgctggctggaaccggcgtggaagagcattatctccaacaaggcacttctaccgctactgtgggagatgttcccgaatcacccgaacctgctgcccgcttattttgcggaagatgatcatccgcaaatggaaaaatatgtggttaaaccgatcttctcccgtgaaggcgcaaacgtgtcgatcattgagaacggcaaaaccattgaagcagcggaaggtccgtatggcgaagaagggatgattgttcagcaattccacccgttaccgaaattcggcgacagctatatgctgattggtagctggctggtgaacgatcaacccgccggaattggcattcgtgaagaccgtgcattgatcacccaggatatgtctcggttttatccacatatttttgttgaataagccacgataccggatggcactcgccatccggtaattgttagcctatctgcaccgacagcatactcaggctgcccatttctataccctcaaccggaatggtaattggctcctgcccatcccacgcacctaacacatacaacaacggcaaataatgctctggcgttgggttcgataacgtgccaccttcatggtcgaggtaattcaccagaggatgttgttccactggcccttgccacgtcagattcgctttcacatactcattaaacgacgtcgcccacggatacggtgaactatcaccgtgccacttcactgtgcgcaggttatgcaccacgttaccgctggcgaccaacattattccttcatctcgcagcgctgccagtttgcgccccatttcgaaatgccaggcggcaggtttgctactgtcgatactcaactgcaccatcgggatatcagcgtcaggatacatcttaatcagcacgccccacgagccgtggtcaaagccccaggcttctttatccagcgtcaccgggatcggcgctaacagctcaaccagacgctgtgccagcgcaggcgaacccggagcaggataatgcgtatcgtacagcgcctgcgggaagccaccaaagtcatgaatcgtgggcggcgtctccatcgcggtcactcctgttccacgggtaaaccagtgagccgaaaccaccacaatcgcttgcgggcgtggcaatgtcatccccaacttctgccagctgcgggtatacaaattatcttccagcacgttcatcggactaccgtgacctaaaaacaatgctggcatacgtgttgaagacatgatgatatccttaactaaaggtgtcattttgatatcctcacaatacgcttgttcggcggagtaagaacccggataacaatgatgatgatcatcagttattttgacgatctgcc

SEQ ID NO: 67 - protein, 193 aa, Escherichia coli
MSNILIINGAKKFAHSNGQLNDTLTEVADGTLRDLGHDVRIVRADSDYDVKAEVQNFLWADVVIWQMPGWWMGAPWTVKKYIDDVFTEGHGTLYASDGRTRKDPSKKYGSGGLVQGKKYMLSLTWNAPMEAFTEKDQFFHGVGVDGVYLPFHKANQFLGMEPLPTFIANDVIKMPDVPRYTEEYRKHLVEIFG

SEQ ID NO: 68 - DNA, 10982 bp, Escherichia coli
  CDS (4075)..(5001)
tgcgctacgcttatcaggcctacgctagctgtgcaatccattgattttgcacaattttgtaggctggataaggcgttcacgccgcatccggcatgaacaacgcgcacgttgtcagcaatctgagcaagtcttacttcacatcatccggcagcgcataagccacaatatagtcgcccatcttcgtaccaaatgaaccgtgaccgcctgcggagatcaccacatactgcttaccattcacttcataggtcattggcgtagcctgaccacccgctggtaaacgaccctgccacagtttttcaccgttgctcatgttgtaagcgcgcaggtagttatctgccgtagcggcgataaacagcacgttacccgccgtggagattggcccgcccagcatcggcatacccatattgaacggcaccggaaccggcatcgggaacggcatactgtcctgcggcgtaccaatacgtttcttccacaccacttcattagttttcagatccagcgccgagatataaccccatgctggctgtttacatggcagaccaaatggtgagaggaacgggttgagcgtgacaccatacggtacaccgtactgtggctgaatgccggattccgtacccgtgcctttggcatctttcggctgctccatcgggttgccaggaccacgcgggatcagtttcgaaacaaacggcagtgccattgggttggcaatcgccacttcacgatttggatcaacggaaatcccgccccattcgaacatccccaggttacccgggaagaccagcgtaccctgttcagatggcggggtgaaaatgccttcatagcgcatctggtggaacatcacgcggcacaccagttggtcaaacatggtggctccccacatatccgcaccgctcaaatctttcgtcggacggaagctcagttcagaaaacggttgagttggggttacgtaatcgcctttcgctgcaccttggggaaccggtttttccggtgccggaaccaccagttcgccattacgacgatcgagcacaaaaatgttgccggttttcgccggagcgtaaataactggcactttctgaccattaacggtgatgtccgccagcgtcggctgtgccggaagatccatgtcccacaggtcgtggtgaacggtctggtagctccacgccagtttcccggtagtggcattcagcgccagaatcgagctggcataacgttcctgttccggtgtgcggttaccgccccagatatccggcgtggtcacgcccatcggcagatagaccagatccagcttcgcgtcataggccgctggtgcccaggagtttggcgagttaaaggtaaaggtgtgttcgtcagacgggattgcgttcggatctttcgcgccgggatcaaaagcccacagcagctccccggtgttgacatcaaaaccacggatcacgccagacgtttcgcgggttgagaagttatcggtaactgaaccggccatcacgatggttttatcggtgataatcggtggcgaagtcggttcatacagacccggtttggtgtctggcatattgctttgcagattgagcacgcctttattggcgaaggtttcgcacagtttgccgttttcagcgttaatcgcaatcagtcgaccatcattgaccggaagaatgatacgacgcgggcaatccgccatcacttccggcgaagcggtttctgctttggcttcatgataagagacaccacggcaggttacgtgctggaaagactcgttggttttcagctcaggatcgtaatgccatttctctttgccgctggcggcatcaagcgcaaacaggcgctggtgagcggtacacaggtaaagggtgtcgcccactttaatcggcgtcacttcattggtgatttcacccggatcgttcggctgcttcacatcgccagtacggaacacccaggcttctttcagattatggacgttatcggcgttaatttgtttcagcggcgaaaagcgttgaccttcctgattacgaccataggcaggccagtcctgatcggctacgggggagatagcttcagcaggtgtggcatcggcgcttaaggtgccgttgatctcctgcggatcgttaaatccggcccaggtcaggataccaccgctaatcagcagtgcgaccaccagtgcggcaactgcgccgctggcaggaatgaccaggcgacgccagacaaacggcaggatcagccagatgccgaagaagaccagaatgtcgctgcgcggagtcagcgcccagaagtcgaaaccaacttcccagacgccccaaatcatggtgccgagcagcagggctgcgtatagccaaagcgcggcgcgtttactgcgccacagcatccaggcgacgccgagcatcacaaggccagcgatagggtagtaccaggagccgccaatcgcgaccagccagcctccgccaatgagtagatacagcccgcaaagcgctgcaaaaagggctgttagcgtgacgagtaatcgtcgcgagcctgtattgttaattgccataaagagacaccatttcaattcattaatattttagtagcaattaattataggttttaacatgtgtgatcgtcatcacaattcgagctttattaacagattccgcgaatgaatagttttactggtatactgcgtgtcttgcgctttgttgcggtgccaaaacctgcccgtgcgaagtgatttgtttttaaatcatatggttagagatatgaaacatactgtagaagtaatgatccccgaagcggagattaaagcgcgtatcgccgaactgggtcgtcagattactgagcgttacaaagacagcggcagcgatatggtgctggtgggtctgctgcgtggctcatttatgtttatggcggacctgtgccgtgaagttcaggtatctcatgaagtcgactttatgaccgcctccagctacggtagcggcatgtccaccacccgtgatgtgaaaatcctcaaagatctggatgaagatatccgtggcaaggacgtgctgattgttgaagatatcatcgactcggggaatacactgtcgaaagtgcgtgagatcttaagcctgcgcgaaccgaagtcgctggcgatttgtacgctgctggataaaccgtcccgtcgtgaagtgaacgtcccggtagaatttatcggtttctcgatcccggatgagtttgtggtgggttacggcattgattacgcacagcgttaccgtcatctgccgtatatcggcaaagtgattctgctggacgagtaagtgtgaagttgccggatgtgttgcatccggcatggcatttttatttgtggttggcgtgtttcagcttgaggttggaaatcccgtgacggtaacgttgctcaagggtttcgcggttggtggcggtaacatccagatcacgcagcaagccgtcgtgaatgccgtaggcccagccgtgaatggtaactttctgcccgcgtttccacgctgattgcataatggtggagtggcccaggttatacacctgttccatgacgttcagttcacacaaggtatccagacggcgctcttgcggcatttcgccgagcaatgagctatgtttgaaccagatatcgcggatatgcagcagccagttgttgataagccccagttccgggttttcaactgcggcttgtacgccgccgcaaccgtagtggccacagataataatgtgttcaacttcgagtacatccactgcatactgaaccacggaaaggcagttcaggtcagtgtgaatgaccaggttagcaacattacggtgaacaaagagttcgcccggctcaagaccggttaaacgttctgcaggaacgcgactgtcggaacatccaatccatagaaagcgcggtttttgcgcttgtgccagtttctcaaaaaacccgggatcctcttccaccagcatttttgaccatagtgcattgttgctgatgagtgtatctatgtctttcatggaggttaacgacctgtaaccaaataattacgtttggctaatatagggcaactccgggacgatttaaaccacagataaagtgtaagaacgtaaggtaagtaaaaatttatgaccattgcactggaacttcaacagcttaaaaaaacctatccaggcggcgttcaggcgcttcgtgggatagatttgcaggtcgaagcgggtgatttttatgcgcttctcgggccgaacggggccgggaaatcgaccactatcggtattatcagctctctggtaaataaaacctccgggcgggtcagcgtatttggttacgatctcgagaaggatgtcgtgaacgctaaacgtcagttgggactggtgccgcaggaatttaacttcaacccgtttgaaaccgtgcagcaaattgtggtgaatcaggcagggtactacggcgtggagcgcaaagaagcgtacatccgcagcgaaaagtatcttaaacaactcgatctatggggaaaacgcaacgaacgtgcgcgtatgttatctggcgggatgaagcgccgtttaatgattgcccgtgcgttaatgcatgaacctaaactactgattctcgacgaaccgaccgcaggcgtggatattgaacttcgccgctcaatgtggggctttttgaaggatttaaacgacaaaggcaccaccatcattctcaccacacactacctggaagaagcagaaatgctgtgccgcaatatcggcattattcaacacggtgagctggtggaaaatacctcgatgaaggcgctgctggcgaagctgaaatcggaaacctttattctcgatctcgcaccgaaaagcccgttaccgaagctcgatggctatcagtatcgactggtcgataccgcgacgctggaagttgaagtgctgcgtgagcaggggatcaacagcgtatttacgcagttaagtgagcagggcattcaggtattaagtatgcgtaacaaagctaaccgtctggaagagctgtttgtttcactggttaatgaaaaacaaggagatcgcgcatgatgcatctttactgggtggcgctaaaaagcatctgggcgaaagagatccatcgctttatgcgtatctgggtgcagacgctggtgccgccagtcatcaccatgaccctttactttattatcttcggtaacctgattggttcgcgtattggcgatatgcatggcttcagctatatgcagttcatcgtaccggggctgatcatgatgtcggtgatcaccaatgcctacgccaacgttgcgtcatcattttttggtgccaagttccagcgtaatattgaagagctgctggtagcgccggttccgactcacgtcattattgccggatatgtcggcggtggcgtggcgcgtggtctgtttgttggcattctggtgacggcaatttcactgttttttgtgccatttcaggtgcattcgtgggtattcgttgccttaacgctggtgctcacggcggtgttgttctcccttgcgggtttgctgaacggtgtgtttgccaaaacgttcgatgacatcagcctggtgccaacctttgtgttaacgccactcacgtatttgggcggggtcttttactcactgactttgttgccgccgttctggcaagggctgtcgcacctgaacccaatcgtttatatgatcagtggtttccgctacggcttcctcggtatcaatgatgttccgctggtcactacctttggcgtactggtggtctttattgtggcgttttatttgatctgttggtcgctgatccaacgtggacgtggtttgcgtagctaaggctatttcctctcctctggatttgggggagaggagttttgacggctatcaccctttatcaacaatggtcagggtagactgattttcggctaaggaggaaggcgatgttaggttgggtaattacctgtcacgatgaccgggcgcaagagatactggatgcgctggagaaaaaacatggggcacttcttcagtgccgggccgtgaatttctggcgcggattaagctctaatatgctcagccgcatgatgtgcgatgctctgcatgaagcggactctggtgagggtgtcatcttcttaaccgatatagccggagcgccaccgtatcgcgtggcttcattattaagccacaaacactcccgttgcgaagtgatttctggtgtcacgttaccgttaattgaacagatgatggcttgccgtgaaaccatgaccagttcagagtttcgcgagcgtattgtcgaactgggtgcgccggaggtgagtagtctttggcaccaacaacaaaaaaatccgcctttcgtcctcaaacataatttgtatgagtattaacccgcgattctgatggcgcttttgctacaataaaagcgttgtttcaccctcggttattttttcatgtacaaacaagctgttattctcctgctgatgctgtttaccgcaagtgtcagtgccgcgttacctgcccgttatatgcaaaccatcgaaaatgctgcggtctgggcgcaaattggtgacaagatggtgaccgtggggaatattcgggccggacaaatcattgccgtggagcccactgccgcaagttattacgcatttaattttggctttggcaaaggttttatcgataaaggtcatctcgagccggttcaggggcgacaaaaagttgaagacggtttgggcgacctcaacaagccgctgagtaatcagaacttagttacctggaaagatacgccggtctataacgcgccgagtgcgggaagtgcgccatttggggtactggcggacaatttgcgctacccgattttgcataaactgaaagacaggttaaatcaaacctggtatcagatccgtattggcgatcgactggcctatatcagcgcactggatgcccaacccgataatggcctgtcggtgctaacctatcaccatattctgcgcgacgaagaaaacacccgttttcgccatacttcgacgaccacatcggtacgcgctttcaataaccagatggcctggctgcgtgacaggggatacgcgacactgagcatggtgcagctggaaggctacgtgaagaataagatcaatctccctgcgcgagcggtggtgattacctttgatgatggcctcaagtcggtgagccgctatgcgtatcctgtgttgaaacaatatggcatgaaggcgacggcgtttattgttacctcacgcatcaaacgtcacccgcagaagtggaacccaaaatcgctgcaatttatgagcgtttctgagcttaacgaaattcgcgatgtatttgatttccagtcacatacccattttttgcatcgggtagatggttatcgccgacccatattactgagccgtagtgagcacaatattctgtttgattttgcacgttcacgccgcgctctggcgcaatttaatccgcatgtctggtatctttcgtatccgtttggcggatttaatgacaacgccgtgaaggcagcaaacgatgccggatttcacctggcggtgacaaccatgaaaggcaaagtaaaaccgggggataatccgttgttactaaaacgactttatatcttaagaacggattcgctggagacgatgtcgcggctggtgagtaaccagccgcagggataacaatcaagcaacctgtaccggaatcgctttcgcggtacgtttcatttcattgtcgccttcaaaataggcgacgttgggtcgccaggtgcgagcttcttcatctggcatggtaacgaagctggcgatgatgacaatatcgccgacactggcgcagtgggccgccgcaccgttaacagaaataattctcgaaccgcgttctgccgcgatggcataagtggagaaacgcttgccgttggtgacattccagatatcaatggcttcgttttcgagaataccggctgcgtcaagaaaatcctggtcaatggcgcaagaaccttcatagtgcaggtccgcatgagtcactttcacgcggtggagtttgccctgcagcatcgtgcgaatcataacttctacctttctaccctgtcgttaacgaagcaggcgatgcctgctttgaggaaattctcacgcagtattgcccgatttttgtttagtgtctactcatctgacggcatttgcgtcagcagtttgcgtaccgcgccgaagcgtgccatgtatcgcctgtaacgaattgatatttctctgaacgctgctcggtaaacaataaagaggtggctgacgatagcgcgccttgactggatactgccttcacgcaaagccacacggaagacagggaagatggatgcaccgagtaccacaccgcatgacgcggtatttaaacaatttttaatgcatgcggagacggctcgcgactttctggagatacatttgccagtggaattacgcgaactttgtgacctcaacacgcttcatttagagtcggggagtttcattgaagagagcctgaaaggacacagcacggacgtgctctattccgtgcaaatgcagggcaatcccggttatctgcatgttgtgattgaacaccaaagcaagccggataagaaaatggcctttcgcatgatgcgttattctatagccgccatgcaccggcatctggaggctgaccacgataagctgccgctggtggtgccgatactgttttatcagggcgaggccacaccttatccgctatcaatgtgctggtttgatatgttttactcgccggagctggcgcgacgcgtctataacagtcctttcccgctggtggatatcaccatcacaccggatgacgaaatcatgcaacatcggcggattgcgattctcgaactactgcaaaaacatattcgccagcgcgacttaatgttattgcttgagcaactggtcacgctgatcgacgaagggtacactagcggaagtcagttagttgccatgcaaaactatatgctgcaacgcggtcatactgaacaagcggatttgttttacggtgtgttgagagacagggaaacgggaggggagtctatgatgacgctggcgcagtggtttgaagagaaagggattgagaaggggattcagcagggaagacaggaagtaagtcaggaattcgcccagcgtcttctgagtaaaggaatgtctcgggaagacgttgcagagatggcaaatttacctcttgctgagattgataaggtaattaaccttatttaagttacctgtgttatgacagatgacgtggggtaaattaataactggcgccatcagccgtagcgccagttaagtattacgccagctcgaccattttgttgtcgatcaggcgagcatcgccaagccaggcggctaccagaattactgcccgtttgctggtttcagaaacttccagcaatgtgtcggcatcgcgaatctgaatatcatcggcgcggaagcctttttcattcagttcttgccccgcaatggtaataatttcatcgagatcccgttccccagcctgcaatttgtcagcaatcgaacttaaaactttgtacagaccaggcgcaattttgcgttgttccgccgtcagataaccgttacgggaacttagcgccagaccgtctttggcgcgcataattggcacaccgacaatctcaatatcgaagcccatatcggcaaccattttgcggatcagcgccagttgctgaaaatctttttcaccgaagcaggcgatgtccggctggaccaggttgaacagcttgctgacaatagtcgaaacgccgcgaaaatgtcccggacggctggcaccttccagcatggtcgaaaggccaggaacgtcaacgtaagtgtgggtttcagtaccgttcgggtagatctcttttaccgaaggggcgaaaactaaatccactttacgtttgtttagcttctcgcagtcctcctgcaaggtccgtggataacgagccagatcttccgggcggtcgaactgcatcgggttaacgaaaatactgacgacgaccacatcggcgcgggctttggcttcgtcgaccagcttcatatggccatcgtgcaggttacccatggtaggcaccagcgccacgcgcttgccttccatacgcaggcggcgaatttgctgacgcagcagcggcagggtttcgataattaacacaacgtgactccttaatggaaactgtgttcttcgcccggataaacgccggactccacttcagccatatactgccgcacagccgcgcggatgtcgcccgtttcggcgaggaaatttttagcgaatttaggaatgtgaccgccggtaataccaaaggcgtcgtgcatcacgaggatctgcccgtcagtgacgttgcctgcgccaatgccaataaccgggatcgccagtgcttcggtaatacgttttgccagttcaaccggcacgcattccagcaccagcagctgtgccccagcagcttctaaggctaatgcatcgctgagcagttgatcgcccgcttcatcgccgcgcccctgaactttgtagccaccgaaaatattcactgactgtggtgttaaacctaagtgaccacatacaggaacggcacgttcggtcagcatttgtacggtttctaccagccactcaccgccttcaattttgaccatgttagcaccggcacgcataaccgttgcggcgttttcgaaggcttgttccggcgtggcatacgccataaacggcaggtcagccagcagcaggcagtttggtgcgccgcgacgtacggcggcagtgtggtaggcgatatcggcaacggtaactggcagggtggagtcgtgcccctgaaccgtcatgcccagcgaatcgcccaccagcatgacgttaagcccttcatcagcaaagagtttggcgaagctatagtcataagcggtgatggtcgcgaaacgttttttttcctgtttgtacttctgcagtaaggagatggtggtcggtttcataacgtatcctgataaattgatgttgtgctgtctggcattttatcagtcacattggtgggggcaatgatttatccgtagcagcact

SEQ ID NO: 69 - protein, 308 aa, Escherichia coli [sequence omitted]

SEQ ID NO: 70 - protein, 256 aa, Escherichia coli
  complement of position 4998-5768 of seq id 68
MMHLYWVALKSIWAKEIHRFMRIWVQTLVPPVITMTLYFIIFGNLIGSRIGDMHGFSYMQFIVPGLIMMSVITNAYANVASSFFGAKFQRNIEELLVAPVPTHVIIAGYVGGGVARGLFVGILVTAISLFFVPFQVHSWVFVALTLVLTAVLFSLAGLLNGVFAKTFDDISLVPTFVLTPLTYLGGVFYSLTLLPPFWQGLSHLNPIVYMISGFRYGFLGINDVPLVTTFGVLVVFIVAFYLICWSLIQRGRGLRS

SEQ ID NO: 71 - DNA, 11756 bp, Escherichia coli; identical to SEQ ID NO: 54
  CDS (2897)..(3184)

SEQ ID NO: 72 - protein, 95 aa, Escherichia coli
MRAIGKLPKGVLILEFIGMMLLAVALLSVSDSLSLPEPFSRPEVQILMIFLGVLLMLPAAVVVILQVAKRLAPQLMNRPPQYSRSEREKDNDANH

SEQ ID NO: 73 - DNA, 10144 bp, Escherichia coli
  CDS (9051)..(9305)
aattataacacagccgcgcagtttgaggtaaacctatacgctttattcacatccaatgcctgatatactcgtttgtcttgccaattacggagtagaagtgccaatgaatgccgaaaaatcgccggtaaaccataacgtagaccacgaagagatcgctaaatttgaagccgtcgcctcccgctggtgggatctggaaggtgagttcaaaccgctgcaccgcattaacccgctgcgtctgggctatattgccgagcgtgctggcggtttatttggcaaaaaggtgctcgatgtcggttgtggcggcggcattctggccgagagtatggcgcgcgaaggcgcgacggtgaccggtctggatatgggctttgagccattgcaggtggcaaaactgcacgcactggaaagcggcattcaggtggattacgtgcaggaaaccgtggaagagcacgcggcaaaacatgccgggcagtatgatgtggtgacctgcatggagatgctggagcacgtccccgatccgcagtcagtggtcagagcctgtgcgcaactggtgaaaccaggcggcgatgtctttttctcgacacttaaccgcaacggcaagtcatggctgatggcggtggttggtgcggaatatattttgcgcatggtgcccaaaggcacgcatgatgtgaagaagtttattaaaccggcagaattgctgggctgggtggatcagaccagtttaaaagagcggcatatcactgggctgcattacaacccgatcactaatacttttaaactcggccccggcgtggatgtgaactatatgctgcacacgcagaataagtgaggttgatgtttggccgcgccaatgcctgatgcgacgcttgccgcgtcttatcaggcctacaaatgctccccgtaggccggataaggcgtttacgccgcatccggcaaccgtgccgactagacagtgattaccatttcaccgtcatcgacaaaaaccctgccgtctgggcaaaatcatcactccctttctgccacgccacgctgccgcgcagggacactcgctgactgatattgcccgtgactcccacttttatttcaccccgttgcttcaccgcatcgtcactgatagtgctgccatcctcttcaatttccgtcgaatggggatcgtgataataattcagatctaatgttggtatgacatgaacagcggtacgccattcgctgtgtaaacccagccgcgtctgaatatcatcaccctgcgattgtgacacgcgcgcacggttagcggcggtaaaatcatcctgctgcacgccctgataaatcacctgcgcctgcggttcaatcaccacaccacgccccggtaaccactgataccccgcctccagcgaggcgataatccccgacgagtggtaatgatctgtgccatcttcttgttcggaaacatcattgctaaaccacgcgtattgcagccagctatccagccaggccccttgcttctgattaccgtgctgaaaccagcttgatgtcagcccaacggcataaccgtggttctggttatcggcgcgagttccggtcatattcgagcggctgtcgccctggttatcgctgtagccaccaacaatcccaagcatccactcgccatccgtgccccagcgcccgctaaacagatcgccgctaagttgcaccgtagaagtgtcttcatgttgagccagttgccccgctgctgtgtaatgataatctccgccgataacacgtaaattcagcgtctgaccatcgccacctgcgtgatcgcgtcgctccatcataaacgcctgatttgccgcccgcaggttattaagataaccgccaactttggcattcaacaccggctggtaagcaggcgtaggttccgggtcgggtgttggatcaggatccggcgtgggatcaggatcgggagtcgggtctggatcaggtggcgatggcggcgttacttcttgcgatcgcagataccagtcgttgttatcttccaccagcgtgtagtcatacgctcccatattgacgtagccgctgcctgccagactgaactgcgcattgttttgaaactgcgtgggatcagctgcgaaatcaaccactttaatgcctgtcgatgtcggctcaccaatccctgtaatggagttaaccaccacagttgtgttgccagcagtattaccgttcatcaccaattgatcgcttaccgagtcatcgccgtttaattcgctatcgagcagtagcgtaccgccgccggtataatcaccgtttaccgtcagcgtatcgccagcgacgccattttgcaggctaaccgcaccggacgtattggtcagattgccattaaccgtcacgttggaaagataagtcaggctgtcagtttcaaggttggtattaagctcacctgtcaacgtcacaccatcggtggcattcaccagcgtcccatcgccgttaaatagtgaggcattaagggcgacggaagtatcctgcccggtcaggcgcaaaaccgtaccatcgctgatgtcgatagtgccgctggaaatagcatcaattgactgaatatcctgatccgcgccagtaacgaacgttgccccatcaccaacccacagtgacgaagcataaggaaggatatcagcaacatcacctttcagggtgccttcttcgacacgtaccgccgactgcgttgtaccgctggcggtcagctccagtgtaccagcccccgttttagtcaatgtgctaccctcatcctgatgctgcccgctgctgtcagccatcagtgcgccccactgcgtgtctacccccgcatcaactgccacttcaccgtcggcgcgcatttcaatatcacgtccgtggcctgccgcatctgaacgcgtgtcaacgtcggaggtaatctccatcacgctttcttgttgcttatcggtaaagataacctggcggttatagtgggtatctccaagctgcgagttgtcgctcaccatcagcgtaccggaggcgatttgtgttgtgcccaaataactattattgtttgccagacttacctgcccgtcgctcgcatcgaccaccacgtagacgccatctttcccgtcgccgccgatatgcaaattgtcgccacctgcaagatctaccacatcctgactgccgataaccgttccgctgctgccactgacttcaaggccatcgttgtatgatgtgccgctctgccaggtggagaaatcagagagatcgagcacaccgccgtttaacacgatcgactgcggatcgtcctggagagcggtaagatctgccgcgtcgccttccagcgaaagcaccgcaccatcatcaacgactatatcgccggttagcgccatcgactgcgcccctgccagcacgtagctgccgttttgcgcaatggtgagctgaccagcaccttcgatgatgccagcaaaactgccctgattaacagtaacgttgccaccagcatcgatatttaaagtgccattctgaaagcccgtcaatgcgtgcacaaaagtttgttgggtcgagccaacgtttagctcagcctgattctgatactgatcaatactccctatcgtcagaccgtagcagtcttgcggatcgtcctggcaatgcgtatcgccgacattcatcagggagttgctgcggcccagggtaacttcaccgttttcaatctgcatctcaccagtaaagtcattgttatctgcattaagtaccagatcgccggaacctgttttggtgattaacccggtaccagcaatagagtcaacagctccgtcattctctgtattgccaataaccagcgtttttccgtcggcaatatcaaaggtaacttcacttaagccgagatacataaagccacccgccgcagaggaaggaccatctccatagcctgctgcgctattgttctcatcgactaacacgcctccgttctggctgtagctgtcatcaacagaaatatcaataagatagggagccgtcacgctattggtatatatcgccccgccataaccttcggcagtgttatttgtaaaggcagtgttatttactatcgtataacctgaaggatgcttgctgtcgctattattatcggtaacatcgattgccccgccatcgccatcactgtaacttgttgatgtatatgcctggttgttatcaaaaataacatcacttaaataaacgtcattattaatggtataaattgcgccacctttgccatcattagcgatgttattgcgaaacatggcgttagtgacacgtaaatcgacggcaccagtatcgttagtaccagaagaatagattgcgccaccatagccgcctgcgacgttaccggaaaaaataacatcagtaagattcagcgttgagttttctttagcaaatatggccccgccgttattatattctcctgtaacggtgttattggcaaacagagtcattccagtttcattttctggtaatagtgaaaattccgctccttgttgcaaaaatacggccccaccgctggcgttattggtcatatccgaaaaaaccagccattgcccatcagcgatactccagtcctgcgtaatgcctgaaaggctttgcctgctggcctgacaactcgctttgacatcatatccctggcatgaatcagtgaccgccgcgacaccgttagcagagaaaagagatgcaatcattgacgggagtaaagataaatactccttgcgtagaaagataatccgcatattaatctaaccatcattttctataagacggcgtatttaatcgcattatacgatatggaatatctttcttttgtaaattgttcaacccggtgcaatggctattttgttattatttgatgaataatatcagtgcgtcataattcaagttaataaccttcagggatatcagttatatttaaactaaattaaagtcatgaataattttcttataatataaggtaaattaacaaaatggcttagcatttaacaataaccgaatagaaaacaaccatttcgccatcaacaatctcttacattcgcttatatattgaccacaactgatacatcagattatgtgatgactcgtgcttagatcaatttttgcaatcattagcaaaaagattaataagccatctatatcaatttatctaacctattatgccgttcaagaaatcgccgaacagttatttttaacaaatttttctcttcccattgactttcccggacaccttgtctgacctaaggtgcgcgaaagccactttttccttcctgagttatccacaaagttatgcacttgcaagagggtcattttcacactatcttgcagtgaatcccaaacataccccctatatatagtgttctaagcagcttcccgtactacaggtagtctgcatgaaactattgcggaaagaattccaaaaacaggtacgacatacatgaatcagaatctgctggtgacaaagcgcgacggtagcacagagcgcatcaatctcgacaaaatccatcgcgttctggattgggcggcagaaggactgcataacgtttcgatttcccaggtcgagctgcgctcccacattcagttttatgacggtatcaagacctctgacatccacgaaaccattatcaaggctgccgcagacctgatctcccgtgatgcgccggattatcagtatctcgccgcgcgcctggcgatcttccacctgcgtaaaaaagcctacggccagtttgagccgcctgcgctgtacgaccacgtggtgaaaatggtcgagatgggcaaatacgataatcatctgctggaagactacacggaagaagagttcaagcagatggacacctttatcgatcacgaccgtgatatgaccttctcttatgctgccgttaagcagctggaaggcaaatatctggtacagaaccgcgtgaccggcgaaatctatgagagcgcccagttcctttatattctagttgccgcgtgcttgttctcgaactacccgcgtgaaacgcgcctgcaatatgtgaagcgtttttacgacgcggtttccacatttaaaatttcgctgccgacgccaatcatgtccggcgtgcgtaccccgactcgtcagttcagctcctgcgtactgatcgagtgcggtgacagcctggattccatcaacgccacctccagcgcgattgttaaatacgtttcccagcgtgccgggatcggcatcaacgccgggcgtattcgtgcgctgggtagcccgattcgcggtggtgaagcgttccataccggctgcattccgttctacaaacatttccagacagcggtgaaatcctgctctcagggcggtgtgcgcggcggtgcggcaacgctgttctacccgatgtggcatctggaagtggaaagcctgctggtgttgaaaaacaaccgtggtgtggaaggcaaccgcgtgcgtcatatggactacggggtacaaatcaacaaactgatgtatacccgtctgctgaaaggtgaagatatcaccctgttcagcccgtccgacgtaccggggctgtacgacgcgttcttcgccgatcaggaagagtttgaacgtctgtataccaaatatgagaaagacgacagcatccgcaagcagcgtgtgaaagccgttgagctgttctcgctgatgatgcaggaacgtgcgtctaccggtcgtatctatattcagaacgttgaccactgcaatacccatagcccgtttgatccggccatcgcgccagtgcgtcagtctaacctgtgcctggagatagccctgccgaccaaaccgctgaacgacgtcaacgacgagaacggtgaaatcgcgctgtgtacgctgtctgctttcaacctgggcgcaattaataacctggatgaactggaagagctggcaattctggcggttcgtgcacttgacgcgctgctggattatcaggattacccgatcccggccgccaaacgtggagcgatgggtcgtcgtacgctgggtattggtgtgatcaacttcgcttactacctggcgaagcacggtaaacgctactccgacggcagcgccaacaacctgacgcataaaaccttcgaagccattcagtattacctgctgaaagcctctaatgagctggcgaaagagcaaggcgcgtgcccgtggtttaacgaaaccacttacgcgaaagggatcctgccgatcgatacctataagaaagatctggataccatcgctaatgagccgctgcattacgactgggaagctctgcgtgagtcaatcaaaacgcacggtctgcgtaactccacgctttctgctctgatgccgtccgagacttcttcgcagatctctaacgccactaacggtattgaaccgccgcgcggttacgtcagcatcaaagcgtcgaaagacggtattttgcgccaggtggtgccggactacgagcacctgcacgacgcctatgagctgctgtgggaaatgccgggtaacgatggttatctgcaactggtgggtatcatgcagaaatttatcgatcagtcgatctctgccaacaccaactacgatccgtcacgcttcccgtcaggaaaagtgccgatgcagcagttgctgaaagacctgctcaccgcctacaaattcggggtcaaaacactgtattatcagaacacccgtgacggcgctgaagacgcacaagacgatctggtgccgtcaatccaggacgatggctgcgaaagcggcgcatgtaagatctgatattgagatgccggatgcggcgtaaacgccttatccggcctacggctcggtttgtaggcctgataagacgcgccagcgtcgcatcaggctccgggtgccggatgcagcgtgaacgccttatccggcctacggctcggatttgtaggcctgataagacgcgccagcgtcgcatcaggcacaggatgcggcgtaaaatgccttatccggcattaaactcccaacaggacacactcatggcatataccaccttttcacagacgaaaaatgatcagctcaaagaaccgatgttctttggtcagccggtcaacgtggctcgctacgatcagcaaaaatatgacatcttcgaaaagctgatcgaaaagcagctctctttcttctggcgtccggaagaagttgacgtctcccgcgaccgtatagattaccaggcgctgccggagcacgaaaaacacatctttatcagcaacctgaaatatcagacgctgctggattccattcagggtcgtagcccgaacgtggcgctattgccgcttatttctattccggaactggaaacctgggtcgaaacctgggcgttctcagaaacgattcattcccgttcctatactcatatcattcgtaatatcgttaacgatccgtctgttgtgtttgacgatatcgtcaccaacgagcagatccagaaacgtgcggaagggatctccagctattacgatgagctgatcgaaatgaccagctactggcatctgctgggcgaaggtacccacaccgttaacggtaaaactgtgaccgttagcctgcgcgagctgaagaaaaaactgtatctctgcctgatgagcgttaacgcgctggaagcgattcgtttctacgtcagctttgcttgttccttcgcatttgcagaacgcgaattgatggaaggcaacgccaaaattattcgcctgattgcccgcgacgaagccctgcacctgaccggcacccagcatatgctgaatctgctgcgcagcggcgcggacgatcctgagatggcggaaattgccgaagagtgtaagcaggagtgctatgacctgtttgttcaggcagctcaacaggagaaagactgggcggattatctgttccgcgacggttcgatgattggtctgaataaagacattctctgccagtacgttgaatacatcaccaatatccgtatgcaggcagtcggtttggatctgccgttccagacgcgctccaacccgatcccgtggatcaacacttggctggtgtctgataacgtgcaggttgctccgcaggaagtggaagtcagttcttatctggtcgggcagattgactcggaagtggacaccgacgatttgagtaacttccagctctgatggcccgcgttaccctgcgcatcactggcacacaactgctgtgccaggatgaacacccttcccttctggcggcgctggaatcccacaatgtggcggttgagtaccagtgtcgcgaaggttactgcggctcctgtcgcacacgcctggttgcaggtcaagttgactggattgccgaaccgttagcctttattcagccgggggaaattttgccctgttgttgccgggcaaaaggcgatattgaaatcgagatgtgaattggttgtagtgccagatacaacgcttatgcgtcttatctggcctacaacgattacatggcgtagtaatacgctttcacctgctcccagtccgctttggggattggctccagatatttttccagctggcggaagtcatgattaatcgctttatcgcgacgcaagcggcgacgacttttctccaggtcaagaaaaccagcttctgcattaccttctgttttcacatagatatggcgaacataacaacagccatgctgacgattaatgctatgcattttcttaaacgccagcgccactgctttcaacatggcttgccgtacttcgtcagaataaggcgatactgcatgctgggcataccagtcagcaatgctgatgaaccccgccatatcttcagtcaccagcaacgctcgccattcaccctcaattttcaccgcttcaccaaaaacgatcttcggcacgatgacaccggcccgttccagttctttaattaccgcaacctcacggacaatcgttggtcggccgaacggataacgtacggaatgaaacagatgatgcgtcatgcgctttacatacagctttttgccgttgcgctcgacgcattgcaccccgctcataccattacggcgatagttaggctcttcaacccagtcgccctctgttgcccaccagtgattaaattcgtcgtactttgctgaaactgccataccctatcgcctgtcatttttattaacgacaatgactataggtggttacctgaggaaaatcttaatgaaacgtgtcgtattaatgaatttcttttgccactactagcttgacaccgcttttacccttcatttgca

SEQ ID NO: 74 - protein, 84 aa, Escherichia coli
MARVTLRITGTQLLCQDEHPSLLAALESHNVAVEYQCREGYCGSCRTRLVAGQVDWIAEPLAFIQPGEILPCCCRAKGDIEIEM

SEQ ID NO: 75 - DNA, 12354 bp, Escherichia coli; identical to SEQ ID NO: 26
  CDS (9425)..(10183)

SEQ ID NO: 76 - protein, 252 aa, Escherichia coli
VGRRRGFLTMRIPRIYHPEPLTSHSHIALCEDAANHIGRVLRMGPGQALQLFDGSNQVFDAEITSASKKSVEVKVLEGQIDDRESPLHIHLGQVMSRGEKMEFTIQKSIELGVSLITPLFSERCGVKLDSERLNKKLQQWQKIAIAACEQCGRNRVPEIRPAMDLEAWCAEQDEGLKLNLHPRASNSINTLPLPVERVRLLIGPEGGLSADEIAMTARYQFTDILLGPRVLRTETTALTAITALQVRFGDLG

SEQ ID NO: 77 - DNA, 14820 bp, Escherichia coli; identical to SEQ ID NO: 32
  CDS (71)..(1078)

SEQ ID NO: 78 - protein, 335 aa, Escherichia coli
MTDKTIAFSLLDLAPIPEGSSAREAFSHSLDLARLAEKRGYHRYWLAEHHNMTGIASAATSVLIGYLAANTTTLHLGSGGVMLPNHSPLVIAEQFGTLNTLYPGRIDLGLGRAPGSDQRTMMALRRHMSGDIDNFPRDVAELVDWFDARDPNPHVRPVPGYGEKIPVWLLGSSLYSAQLAAQLGLPFAFASHFAPDMLFQALHLYRSNFKPSARLEKPYAMVCINIIAADSNRDAEFLFTSMQQAFVKLRRGETGQLPPPIQNMDQFWSPSEQYGVQQALSMSLVGDKAKVRHGLQSILRETDADEIMVNGQIFDHQARLHSFELAMDVKEELLG

SEQ ID NO: 79 - DNA, 10281 bp, Escherichia coli
tataacactggagaataaaatttatccggtgaatgtggtcggaaaacaaagaggaaaggggggggggctaatcggcagggaaggccgccccggatagcgggcggcagaaggaatcagaatttccaggtcagacgggctgcaagttgcagaccgttaaaatcatcggttggggtgtcgtaccacactttacctgccgtcagcccgagattaagttgctcagtcagcggttgaatacgttgcagactgacgctcttcatgctgccgtagcgtgtttctggcgtccagtcataggtgtaagcacctgttccgcggcttagccatagttgcgtataaccagtgccgcgcgggtcattcagacgcacggaaatcatattgctataactaccacctgcatcgctggagtcataatgggtatagcggtagctggtgatcaccgggccagtatagagtgatacgccgccttgccaggcatcgacttcgacatcatcgtaatatttagtgtagcgataaccggtcgtgaaaagcgtttttggtaacagggccaggttaatatcctgacgaaaatcctggcgggcaaagaccggcgtattatccgcaaaggcaatacccgttcgggttgtcagccagttattccatttataccagaccgcaccctgaccgcgagtggcattgaaatgttcagtttcataatcacgacgcccctgggaaagattaaaaagcagcgttgcgttttcaactttcgccaccagttcagcatacgctaaattacggttgccatgatcgccagaataatcggtaaaatcgtagcccgcggtaatggaagttaacccggcataagcgggcaatgcgctaaaaatggccgccgctaataacgtccgttttatcattttaatctcctgtacggataagttcttgtcggagtgaataagttccggtaggtaaattacgttctacaatcacgcgcgggccaagttgcgtgttcggggaaataattcgcccaggcaaaataataacttgtacgccaaggcgtgaacgctgcccgatataacaacctaatttatcgcatccggtagcgataattccctctggagttcgaacagacacgggctgttcatccagacgatgattactggtacgtacttgtgcgcctaaatatgcctggtttgcaactaccgagtcggcaataaaacattgcggaccaatcgttgcttccgcttcaataaccgcatttttaatctcggtggcaaaaccaatttttacgccattgctgattattgtgccaggacgaataaacgcataattactagactggccccctgaatctccagacaaccaatatcacttaaataagtgatagtcttaatactagtttttagactagtcattggagaacagatgattgatgtcttagggccggagaaacgcagacggcgtaccacacaggaaaagatcgcaattgttcagcagagctttgaaccggggatgacggtctccctcgttgcccggcaacatggtgtagcagccagccagttatttctctggcgtaagcaataccaggaaggaagtcttactgctgtcgccgccggagaacaggttgttcctgcctctgaacttgctgccgccatgaagcagattaaagaactccagcgcctgctcggcaagaaaacgatggaaaatgaactcctcaaagaagccgttgaatatggacgggcaaaaaagtggatagcgcacgcgcccttattgcccggggatggggagtaagcttagtcagccgttgtctccgggtgtcgcgtgcgcagttgcacgtcattctcagacgaaccgatgactggatggatggccgccgcagtcgtcacactgatgatacggatgtgcttctccgtatacaccatgttatcggagagctgccaacgtatggttatcgtcgggtatgggcgctgcttcgcagacaggcagaacttgatggtatgcctgcgatcaatgccaaacgtgtttaccggatcatgcgccagaatgcgctgttgcttgagcgaaaacctgctgtaccgccatcgaaacgggcacatacaggcagagtggccgtgaaagaaagcaatcagcgatggtgctctgacgggttcgagttctgctgtgataacggagagagactgcgtgtcacgttcgcgctggactgctgtgatcgtgaggcactgcactgggcggtcactaccggcggcttcaacagtgaaacagtacaggacgtcatgctgggagcggtggaacgccgcttcggcaacgatcttccgtcgtctccagtggagtggctgacggataatggttcatgctaccgggctaatgaaacacgccagttcgcccggatgttgggacttgaaccgaagaacacggcggtgcggagtccggagagtaacggaatagcagagagcttcgtgaaaacgataaagcgtgactacatcagtatcatgcccaaaccagacgggttaacggcagcaaagaaccttgcagaggcgttcgagcattataacgaatggcatccgcatagtgcgctgggttatcgctcgccacgggaatatctgcggcagcgggcttgtaatgggttaagtgataacagatgtctggaaatataggggcaaatccaattacctatcaggcagtttgcgccaatcactaccggaccctgaataacggcaccatgacaaatacgggtattcgcgccgataacaacttcacctgcagtttcatcaataattacctggtctgcaatctgaatatttttctctttaacattaagcttcagatagtttttcagttcctgtgacagaaggttgggaataagcggttgacgcttccaccagtgcggaatagcgggtgggtttgtcgcgctgaggttcgcgtccagtaaaaaaggcaataagtccataaataatccagatggcataagctaataatacatacacaacggaaagcggcgctaaaggcaccaacaaccagcaacgatgaaaccaggcgctaaaagcaccaataacacaaactacgccgacccagataagcggaaacattgccaacaccactccatgcggcccggtggtgatgaattcattaaaccaggtagtgagataaatcccaacgccataaagcacaaccaacagcataggaaatatactgaagataccgaagcggctaaataaaagtcttttatgcaggcgcatacagaccgcgtatcccacaatccaacgccgccagcgacgccactcctcacgcgggctgttgcattcctgtgggtatacgatgcagcgattcgcctgccgaatacggtagccgtttgccaccaatgtccaggtgagatcaaggtcttcgactttagtacgatccgagaaaccgaacttacgcaatacatcagtacggaacatcccgcaggcaccgctgataataaacggtgcgccacccaggagctgctgtagcgtgcgcttcataacaatcatcggcaactttacggtcgcgcggatgtgcggtaacagacccgcgcctttcaacgcagtagagggaatgccgcctacggcatcggcaccgcgctcaatttctgccagcatatagcccattccgtcttgatcgggcggaacataggtgtcggcatcacttaaaaaaacctggtcgcaggtggcgtaattgaggccattcatcagcgcaccacctttaccggtatttttttgcgtgacggcaacaaagcggtcgccccatttgcgtttgacttccgccatgaccgcttcggtattgtccgtggagccgtcgttaacgcaaattacccggcaaaaataagggttacgcagtagattatccagtgactgcgccagacacgggccttcgttatacgcaggtataatggcgtcaatacagcctttcttttgactgggtttacgtcttagcgtacttaaaaaccatagcaacattgctatggacatacagataaatatccaggttttcatgcaatttgctcaaagaatcattttatgaattacaaagccttcacccagatcgctattgacctgttgtccgcgaaattgtgcaactgcacgcaggcgatcatgacgcatataatcgcgtcgttcctagcttttatgtttttttaatgcagcaagtttgactgtgaaatattcttctttaacggattcaaaaacctgaggcataaatgaaagccaggtacttggggtttcgtagccgagaatttgcggaatagttcggcaggcaaccattgaagcttgataaacagcaagatgatcctgatggcggtcggcatcatgcatggtatatacccgcatgatttcaacatcagaaggaatttgatttttaatgatgtcttccagggcggaaatcatatcattgagctgtaaatgagcgcgggtgtcagcaaaattaagatgaatagtttggtggcaccctaatatctttagggcgttgcgcgattcttcatggcgatcgattattccatctgtgccagagttgccggtagtcatcaccacggctgcgatataaattcctttttgcgcaagacgagcaagcgatgcgccacagcctaattctatatcgtcaggatgtgcgccaatagcaaggataccctttcttttatttgccgaagaaaggagggctgaatctaaaaccttatccacttaatgacactccattttatttattatactacaagcacaacgatgcactcagagacgtaatctctggcgcagccagatgttaatttataaatgttaaatgttgctaataactgaaaagcaagggctttcagacccgtgggttcgactgggtaatgtttctatgcaattcatatgttaagtgtttgtatgtttggtatgtatagttattttgttttatacattgtatttagatgtgatttagtttgtcaattaattgcatttaaaaaatatgttctgtgaacaagcattgtttatatacattatgtgaatgtaatatgcgagtgattgagaatgatacagtgatatatacaatgcgaatataatagttttattatatgtattgatattgatagaaataatgaagtaataaatctcgtaatgtggttgtttatgcatcactaaaatgaagtgtagtaattttcccaattgttagaacggagtaattgcatatttaatctttccttagccgtttttttgctaagaataaaatcatctgtgcgataacgactaattcttttaatgaatgtttttattcctgaatactgctcccataacaagacaggggagcagacaatcatggcaatttcatcgcgtaacacacttcttgccgcactggcattcatcgcttttcaggcacaggcggtgaacgtcaccgtggcgtatcaaacctcagccgaaccggcgaaagtggctcaggccgacaacacctttgctaaagaaagcggagcaaccgtggactggcgtaagtttgacagcggagccagcatcgtgcgggcgctggcttcaggcgacgtgcaaatcggcaacctcggttccagcccgttagcggttgcagccagccaacaggtgccgattgaagtcttcttgctggcgtcaaaactgggtaactccgaagcgctggtggtaaagaaaactatcagcaaaccggaagatctgattggcaaacgcatcgccgtaccgtttatctccaccacccactacagcctgctggcggcactgaaacactggggcattaaacccgggcaagtggagattgtgaacctgcagccgcccgcgattatcgctgcctggcagcggggagatattgatggtgcttatgtctgggcaccggcggttaacgccctggaaaaagacggcaaggtgttgaccgattctgaacaggtcgggcagtggggcgcgccaacgctggacgtctgggtggtgcgcaaagattttgccgagaaacatcctgaggtcgtgaaagcgttcgctaaaagcgccatcgatgctcagcaaccgtacattgctaacccagacgtgtggctgaaacagccggaaaacatcagcaaactggcgcgtttaagcggcgtgcctgaaggtgacgttccggggctggtgaaggggaatacctatctgacgccgcagcaacaaacggcagaactgaccggaccggtgaacaaagcgatcatcgacaccgcgcagtttttgaaagagcagggcaaggtcccggctgtagcgaatgattacagccagtacgttacctcgcgcttcgtgcaataaaaggaggcgcagatgctgcaaatctctcatctttacgccgattatggcggcaaaccggcactggaagatatcaacctgacgctggaaagcggcgagctactggtggtgctggggccgtccggctgcggtaaaaccaccctgctgaatctgattgccggttttgtgccttatcagcatggcagcattcaactggcgggtaagcgtattgagggaccgggagcagagcgtggcgtagtttttcagaatgaagggctactaccgtggcgcaatgtacaggacaacgtggcgttcggcctgcaattggcaggtatagagaaaatgcagcgactggaaatcgcgcaccagatgctgaaaaaagtggggctggaaggcgcagaaaaacgctacatctggcagctttccggtggtcaacgtcagcgggtggggattgctcgtgcgctggcggcgaatccccagctgttattactcgacgaaccgtttggtgcgctggacgccttcacccgcgaccagatgcaaaccctgctgctgaaactctggcaggagacgggcaagcaggtgctgttgattacccacgatatagaagaagcggtgtttatggcgactgaactggttctgctttcatccggccctggccgtgtgctggagcggctgccgctcaactttgctcgccgctttgttgcgggagagtcgagccgcagcatcaagtccgatccacaattcatcgccatgcgcgaatatgttttaagccgcgtatttgagcaacgggaggcgttctcatgagtgtgctcattaatgaaaaactgcattcgcggcggctgaaatggcgctggccgctctcgcgtcaggtgaccttaagcattggcacgttagcggttttactcaccgtatggtggacggtggcgacgctgcaactgattagcccgctatttttgccgccgccgcaacaggtactggaaaaactactcaccattgccggaccgcaaggctttatggacgccacgctgtggcagcatctggcagccagtctgacgcgcattatgctggcgctatttgcagcggtgttgttcggtattccggtcgggatcgcgatgggacttagccctacggtacgcggcattctggatccgataatcgagctttatcgtccggtgccgccgctggcttatttgccgctgatggtgatctggtttggtattggtgaaacctcgaagatcttactgatctatttagcgatttttgcaccggtggcgatgtcggcgctggcgggggtgaaaagcgtgcagcaggttcgcattcgtgccgcccagtcgctgggtgccagccgtgcgcaggtgctgtggtttgtcattttgcccggtgcgctgccggaaatcctcaccggattacgtattggtctgggggtgggctggtctacgctggtggcggcggagctgattgccgcgacgcgcggtttaggatttatggttcagtcagcgggtgaatttctcgcaactgacgtggtgctggcggggatcgcggtgattgcgattatcgcctttcttttagaactgggtctgcgcgcgttacagcgccgcctgacgccctggcatggagaagtacaatgagtgaacgtctgagcattaccccgctggggccgtatatcggcgcacaaatttcgggtgccgacctgacgcgcccgttaagcgataatcagtttgaacagctttaccatgcggtgctgcgccatcaggtggtgtttctacgcgatcaagctattacgccgcagcagcaacgcgcgctggcccagcgttttggcgaattgcatattcaccctgtttacccgcatgccgaaggggttgacgagatcatcgtgctggatacccataacgataatccgccagataacgacaactggcataccgatgtgacatttattgaaacgccacccgcaggggcgattctggcagctaaagagttaccttcgaccggcggtgatacgctctggaccagcggtattgcggcctatgaggcgctctctgttcccttccgccagctgctgagtgggctgcgtgcggagcatgatttccgtaaatcgttcccggaatacaaataccgcaaaaccgaggaggaacatcaacgctggcgcgaggcggtcgcgaaaaacccgccgttgctacatccggtggtgcgaacgcatccggtgagcggtaaacaggcgctgtttgtgaatgaaggctttactacgcgaattgttgatgtgagcgagaaagagagcgaagccttgttaagttttttgtttgcccatatcaccaaaccggagtttcaggtgcgctggcgctggcaaccaaatgatattgcgatttgggataaccgcgtgacccagcactatgccaatgccgattacctgccacagcgacggataatgcatcgggcgacgatccttggggataaaccgttttatcgggcggggtaatacgagagtggacggtcccctcgcccccttggggagagggttagggtgagggggcgttcaccgtactttcaacaggttaactccccctttctgagaggaaacaaaattaacgcagaatcttcttctcagccaaatccagcgcaaagtagctgaaaatcagatccgcacccgcacgcttaatcgaacctaagctttcgagcacgactttctcttcatctatagcacccgccagcgcggcgaacttaatcatcgcatactcaccgctcacctgatacgcgccaatcggcaattcagtacgttcacgcagctcacgcacgatgtcgaggtacgctccagcaggtttaaccatcaggcagtctgcgccctgggcttcatccagcagtgattcacgaatcgcctcacgacggttcattgggttcatctgatagcttttgcggtcgccttttaatgcgcttccggcagcttcacggaacgggccataaaaggaggaggcgaacttggtcgaatacgacataatcgccgtatctttaaatcccgcagcgtccagcgcctgacgaatcgcctgtacctggccgtccatcgcggcggaaggggcgatgaagtctgcacctgcagcagctgcaaccacggcttgcttgcctaaattttccagagtcgcgtcgttgtcgacgccatgctcgcacagcacaccgcagtgaccgtgagaagtgtattcacagaagcaggtgtctgacataacgatcatttctggcacggtctgcttgcagatgcgcgacatacgcgccaccagtccatcttcccgccaggcatcgctgccggtttcatcggtatggtgagagatgccaaaagtcatcacggaacgaataccggcgttggcgatgcgttcaatttcgcgtgccagatgtttctctggaatgcgcatcacgcctggcatggcttcaacggctttgtagtcgtcaatttcttcttcaacaaagatcggcaacaccaggtcgttaaggctaagtgttgtctcttcaaacatagcgcgcagcgcaggagatttgcgcaggcgacgagggcgttggattaagtctgtcatggtctgcctgatgtttgtggaatcgaggggcatagtatacctgaagcagggtagggatgttttacgaaagttgtcgcgatgttgacaagaagagaatggaagagaggccaggacatctttttaatagaaacagcaataattttatattcactgaaaatatttttaatctttatttatagctgttggttattattttttggagtttggttgcgctgctataaattgaataattaaaactttgttgcatattcataggatatttatctggtttgtgtttgtgatatttattatgcgtatgcttcaaaaacaaaattatctgcaacatgttgaaatactgtgcttttatgaatttgatgcgtgtttttctccataaattatatatgtccacattcggacttaggggaaagaataattgaaccattcgtctgtaacgcagcataatcgttagcgcgaaacataatatgttttctatgcattgataattgatggatcaacttattacgtccctg

SEQ ID NO: 80 - protein, 335 aa, Escherichia coli
  complement of position 8798-9805 of seq id 79
MPLDSTNIRQTMTDLIQRPRRLRKSPALRAMFEETTLSLNDLVLPIFVEEEIDDYKAVEAMPGVMRIPEKHLAREIERIANAGIRSVMTFGISHHTDETGSDAWREDGLVARMSRICKQTVPEMIVMSDTCFCEYTSHGHCGVLCEHGVDNDATLENLGKQAVVAAAAGADFIAPSAAMDGQVQAIRQALDAAGFKDTAIMSYSTKFASSFYGPFREAAGSALKGDRKSYQMNPMNRREAIRESLLDEAQGADCLMVKPAGAYLDIVRELRERTELPIGAYQVSGEYAMIKFAALAGAIDEEKVVLESLGSIKRAGADLIFSYFALDLAEKKILR

SEQ ID NO: 81 - DNA, 10353 bp, Escherichia coli
agcttattgtaggccggataaaacgcgccagcgttgcatccggcatttggctcctgttgccggatgcggcgtgaacgccttatccggcctacaaaaccacacagatcatgatgttatgtgcgtttatgaccgaatgcggaccacattcacatcatttcttacgcgcgtatttcagtgaatccagcgctacggcgaagataataatcgcccctttgatgatgtactgccagtatgggtttacgccgatatacgtcaggccatagttgatgacggtaaaaataattaccccggtcaccacgccaatcaccgtccccacaccgccgctgaacgatacaccgcctaccacgcacgccgcgatagcatccagctcatacataaagccgaggttgttggtggcagagccgatacgtccggcttctaacatcccgccaaaggcatagaacacgccagacaacgcgtagatcatcagcaggttcaggccgacgttgacaccagatacttttgccgcttccgggttaccgccaatggcaaaaatgttcttaccgaagcgggttttgttccacaacacccagacgaacgccaccgcaatcaacgcgtagaaggtgatgtaagagagacggaaactccccagcgcgacaaagccctgagcaaaggtagagaagccactgtcaaaaccagaaattggcgacgccccgacaaagtcgtaatagagcgagttgatgccatagacgatgatcatcgtgccgagcgtggtaatgaacggcgtcacgttgagataagcgataatcagaccgttgatcaaaccgatcaccgcaccaatggcacagacaatcagaataaccagcgcaatcggcatcgtcgccatttccgggaacactttgttggcgttatccatggactgcaataatgtcgcagccaccactgccgccagccctacctgacgaccagcagaaagatcggtcccctgggtgacaattaaccctgccacaccgagcgcgataataatacgcaccgatgactgggtgagaatattacttaagttcaacagacttaaaaatgttgggtcctggaaaataataatcgccagcaaaactaaaagaacgacgtaaataccgccctctttcaggtaagtaagaaaacttttcttatttaacgcactcatgggaagcccctaatcttaaaggtgcaaagacgcaagacgcagaatttcgttttgcgttgttgtttttgtatcgacaattccggaaacgagaccattgctcatgaccagaatacggtctgttatccctaacaactcaggcatttcagaggagataataataatccccttgcctttcttcgccagttcggcaattaactgataaatttcaaacttcgccccgacatcaataccgcgcgtcggttcatcgagcattaatatttctggttgcgttagtagccagcgaccaataatcaccttttgctgattaccaccggagagcgaaccaatttgcgtccgatgacccggcgtttttacccgcatcgaatcaatcacccactgggtatcgcttttcatccgcgagttatccagtaaaccaactttatttttgtagttgcgaatattggaaattaacgagttaaaaccaatatccagataggcataaattcccgttgagcggcgctcctcagttaccagtgcaaatccatggtttatggcttcgttggcattatggttattgatctgtttgccgtgcaacgttatggtgccagccgatttctcgcgaataccaaataacgtctcaacaatatcggtacgtttcgcccccaccagaccggcaataccgaggatctcccctttatgcagatcaaacgagacatcgcgaatcgacggctggcgcagtgacgtcaggttacgtacctcgaggatgacttcgcccggtttgttttctttgtcagggaaacgctggttaagagaacgcccaaccatcatggcgatgatcttgtccatcgtcagtcctgccagcggttcggtggcgatccactgaccgtcgcgcaatacggtaacttcatcacataactggaagatttcttccattttatgcgagatataaacaataccgcagccgcgctcttttaatttacgaataatagtgaacagatgattgacctctttttcggttaacgaagaagtcggttcatccataatcacaattttcgcgttataggaaaacgctttggcgatttcgatcatctgcatttgcgaaacggataatgtgccgacgcgcgcacgcggatcgatatcaatatccagttcgtcaaaaatcgctttggtttcgcggtacattttgtcctgatcgacaaacatgcctttggtgggatatcgccccagccacatgttatccatcaccgaacgttgtaataccaggtttaactcctggtgtaccatcgaaataccattttccagggcttcttttgcagaatggaaatcgatctctttaccctggaataaaatggtgccggagtctttttgataaataccaaacaggcattttaataatgtcgattttcctgcaccgttttcccccattaatgcatggatagaatgtggccggacttttaaattaacgttatcaagtgccttaacaccaggaaaggacttgttgataccgctcatttccaacaagtattccccggaggacggagtcgttgagctgaccatataattttaccttgttggccatacaataagggcgcagtaatagactgcgcccaatcagtcttatttcttgctgaattcagccaggttgtctttatctacgccaacataaggtacgcggaccactttgttgtcgattttccagttggtgccatcagccgcacctttaccatcggccaggtttttcgccagatcaaaggtcgctttcgcctggttgttagcatcgttcagtacggtgcccgccagtgcaccggatttcaccagcgccagcgcttctggcagcgcatcgacgccaaacaccggaatgctggacttgttgtgtgctttcagcgcttcaaccgcgcccattgccatcgcatcgttgttggcgataaccacttcgattttgttggcgttcgggccagacagccaggcgtccatcttatctttcgcctgagcggtgtcccacattgcggtatctaactgtaactgttcagttttgatgcctttatcgttcaattctttaatcacgtaagtggtacgtgcttctgcatccggatggcccggttcacctttcagcagtacgaactgaatctgaccgtctttgttcagatcccaaccctgattcgccgcccagtgtttagcaatcaaatcgccttgaataatgccggactctttggagtcagtgccaacgtagtaggctttgtcgtagctatccagcgccttacgagacggttctttgttgaagaaaaccaccggcacgttttgcccacgcgctttctcaatcaccgtacccgcagctgccgggtcaaccaggttgattgccagtgccttcacccctttcgccagcaatacgtcgatctgatcgttctgcttggactggtcattctgagaatcattcatcagcagctgaacatctggcgcggctttcgcatcttgctcaatagccttgcgcactacagacataaagttatcgtcgtacttatagattgttacaccaatgcgagtatcagcagcgtgtgcagcggcaccgaataacatgctggccatcacagcagacagggttaacaccttcttattcatggtatctccggtttttcttatgcagggtagtgcttgagataaatgctcggcggggcagtagagttaatgaagtgttactgaacgccgaagctcactttttaaaattcgttcttccatgcccggtaacgctccagaaaacggctttaattgttgttatgacgctgttacctcggcaaaagtgattattcactgttacatacgggttacaacgttaaaacggtgcaatcatagctatcacattgttaagatactgtgaaatcactcacagattgaaagcggttacatcgcctgatttgttgagttagtgatcgccgccgcattctggcgtgttgcgacagaatggcgacgcactaacgtcggcataaaacagtggctggcacgaggatcaatattgcctgctgccccctgcaaggccagttcggtggctaatttcgccattgaagcaatgggataacgcacggtcgttaattgcgggtcggtgtaacgggcgatgggaatatcatcgaaaccgatgattgagagatgtaacggaatcgcaatgccattatcttttaatgctgtcagtgcgccagcggccatattgtcgttataagcaaatacagcggtaagttgtagattgcgccccagcagttcaaccatcgccgcctcaccgcccggcatgtccggcgtaccagcgccaatccagctttccggcggaataatatcctgctctttcaacgcactcatccagcctgctttacgcatggcgtcatcttcaatgccgtggctggaagaaagataaccaatacgttgatgaccgttattcagcaacatgcgcgtcgccattcgggcaccgctgagattatccaggcaaacgcaacgatgggcgtaccccggcacaacgcggttgattaacaccataccgggaatgttatccataaattgcgccagttcatcgtcactcaatgcttttgagtgaacaatcaacgcattacaacgctggcgaattaacacctcaatggcgtgacgctctttttccgcttcatgatagctattgccgattagcacgtatttctgatgctgctgagcgaccagatccaccgcttttaccagcgcgccgaaaaacgcatcagaaacgtccatcaccaccacgccaatggtgtcgctaacctgagttgccagcgcctgggcattggcgtttggccgataatccagctcactcacggctttcattactgcttcacgcgtgtcggcactgaccagcgtgctgttattgagcacccgggaaaccgttgccacagagacgccagcctgacgcgctacatcacgaatggtgatcatattcactacctgttatgagattgcagtaaatgactgcttgctggcggctattttgtcagcactgaatacaggacttcgtgaatcgagtcacagcaatggaaacggttacagccgttttgttaacgaatgtgatccagatcgttatcttgatgttttagatattgccggtccggcagcacgcaaagttaactgacgccagagccattccaccggcccctggcggaagtaacgcagccagataacagagaagaggatattcgccagccataccggaataacaaacgccagcagctccaggcggtcaaaatgcataaacaaaccgaggtggtaaaaaagcgtggtacaaatcagcgtttgcaatagatagttggtcagcgccatccgtccgacgcaggcgatcgcaagcaccagcttaaagcggctcaattgcggccagaagccataaaacagcgacgcatagccaatcgcctgaaacggcgcactcagttcccgcggcatttgaagtaagaaggcacaccagcgatacgcccagtccagctgccattgcagggcgatggcaggaaggttaatggtcaccccaatcgccaccagcacaaaaccagtacgacgatagtgacgtaagctgaactgccctttcagccagccgctgcgcatcagcgccgcaccaatgagcatcatccctgccagttgccagccatactgtgcgcccagtgccagtaaactgttgccaacaccatcggcacgattactgatcgcttcaacgccgccgtgaagcttccagtatttttcatacaaaatagccgatgcatccggcgtccaggcgcggctggtctggctgtcggaaatcagccccaataacagcaaaacgccaagccccaccagataaagcatgacgcctgtattaaacaggctttttaccgatggcgcatcgcgcaccagccgccagcagattaagcccaccagcccgtaagccagcaaaatatcgccgtcccagaacaataaaccgtgaataaagcccaacaagactaacagcgttaaccgcgactggatccagcgtctgccacggggcagcaacatttgcaggcccgcaccaaacagtagcgcaaaaagcgtgaggaatttcacctggccgatgagatcaagaaatgcccaagtccatgcatcccgcggcgtaatagcaccgtaccaggcgggattgagataagccgcctttggtagcccaaaggcgctgatgtttaatagcaggatccccagaatggcgacgccgcgaacaaaatcgagcgtgacgttgcgctccatggttcctgccttttaatcagttgtgatgacgcacagcgcgcagaaactcgtggcgcgtattctgactggatttgaacaatccaccaagagaggtcgttgtcgtggcactggttgcatcgcggatgccacgcgccttcacgcagtaatgcaccgcgtcgatcgagacagccacgttattggtgcccagcagcgtttgtagcgcaataagaatttgctgcgtcagacgttcctgcacctgcggacgctgggcaaagaactgcacaatgcggttaatttttgacagaccgatcaccgaatctttcgggatataggccaccgtcgctttgccatcgatggtaacaaaatggtgttcacaggtgctggtcagagtgatatcgcgcacggtgaccatttcatcgaccttcattttgttttcaatgagggtgattttcgggaaattggcgtaatccagaccggagaaaatttcatcgacatacattttagcgatgcgatgcggcgtttccatcaaactgtcatcagccaggtcgagattcagcagctgcatgatttcggtcatatgaccagcaataaggcttttgcgcgtttcgttatccatttcatgcacgggcgggcgcagcggtgtttccagtcctcgcgcaactaacgcttcatgaaccagggccgcttctttactgagtgatggcatttatgatttctcctgcaggtgtgacgcctccgccctgcgtgggggcaaagttattaagctgatttacagcctgattattgtgcgtgaggcggcgcacataatccagtattcacagcgataattattgtaattgccgctgcctttcatcagcagatgttaaaacatcgttatgcaaatacggaagtgaaagttactcacagcacattgaataaacggtatgatgaagaaattgcaaacaacacaacaaggagccacgcatggaaatgctcgaagagcaccgctgttttgaaggctggcagcaacgctggcgacacgactccagtaccttaaactgcccgatgacgttcagtatctttctccctccacctcgtgatcacactccgccaccagtgctgtactggctttccggattaacctgcaatgacgagaacttcaccaccaaggcgggtgcccagcgggtagcggcggaactggggattgtactggtgatgccagacaccagcccgcgcggcgaaaaggttgccaacgacgatggctacgatttaggccagggcgcaggcttttatcttaatgccacgcaaccgccgtgggcgacgcattaccggatgtatgattatctgcgcgatgaattaccggcgctggttcagtcgcaatttaatgtcagcgaccgctgcgccattagcggtcactcaatgggtggtcacggtgcgctgattatggcgctgaaaaatccgggtaaatacaccagcgtttcggcctttgcgccaattgtgaatccgtgcagcgtcccgtggggaatcaaagcgtttagcagctatttaggtgaggacaaaaatgcatggctggaatgggacagttgcgcactgatgtatgccagtaacgcgcaggatgcgatcccgacgcttatcgatcagggcgataatgatcagtttcttgccgaccagttgcaacctgcggtactggcagaagccgcgcgccagaaagcgtggccgatgacgctgcgtattcagccgggatatgatcacagttactacttcatcgcctcttttatagaggatcacctgcgcttccatgcgcagtatttactgaagtgaaagtccgcccggttcgccgggcatcttctcatcagaagcgataatccactgccataaagtaacgacgtccgtcttcgttatagctgtagtcgtcacgactgagatccttgtcgccaaggttcagcacgcctgcgcgcagtttgacgtctttagtcacctgccaggccgcgccggtattccagatggtataaccgcccggtgttttagccgtcgcgctgtcggcgcgtttctgcccggtatagtgcccagaaacatagaatgaccagtcttccagcgccagcggtttccagtccagcgtaccgttagcagtatggaacggcagatcggatagcggtttgttttcgccgttgctgacatcacgaccatcgttgtaggtgtagttgatcgacagtttccattcatcgttgaacggaattttcagttcggtttccacgccctgaatacgagctttgttaacgttgtagtagctaaataccggtatgcgccgtccgttagcgcccgtctcaaaaccaacaaagttttggtagcccggtgcagcgttgacgtcagacgtacggctgatgctgatacgatctttcacatcgttacggaaaacggtaacgctggattcaaccccttccagccagccttcttcacccatgtagtaaagccccagctcccaactttcgctggtttctggtttcagatccgggctacccacaatcttacatgcgccacggcaggaattgctcgtccagtcagggctaagttgcaacagagaaggtgctttaaatgccgtcgcccagccccctttcaccgttacggtgtcggtggcgttataaaccaggtaggcacgcggactccagtgttcaccgtaggtttcgtgatcgtccatacgcacgccggtcgtcagcgccagcggctcgaagatccgccattcatcttccacaaacagcgcgtactggctggcagacgttttggagctggttcccccggtcaggttcaccgcatcgctaagtttgtcgtgacgccattcaccgccaaccgtgagaaactgattaatcgccgtcagcggcaacgtgtatttgccgtcgaccgtattgctttcggaagttatcgggctgctgttgccagggtttttgttctcgactttctcaccgtagtatttcagttcgctggtgccgtaatcccaacgcccattatggctgacggagtagttctggcgttccaggcggtttttgtccagcgagtcggaatcacgatcctgacggtcgaaaccgtatccggcagtaaaatcgtgattttgattcggtgtccaggcaaattcgacattgccgtcgcggctggagaatccttcaatacgcggcgtttctccggtatcggtggtcgttgagttttgcgggtcatccttttcacgttttgccaggctgccgtaagctttcattcccagcacaccatcaattaatggtccactggtaaagaactgaccgttataggtgtcaccgcgatcgcgatgttcctgaatggtggtatcgacggtaacggtacccgaccatttctgaccgatttttttggtgatgatattcactacaccgccgagcgcatcggaaccgtacagcgacgacatcgggccacggaccacttcaatacgttcgatggaatcgaccgggatccagttcagatcgaaatcattgtggcggaagacggcattgcgggagttcacgcgtttaccgtcgacgagaatcagggtatagctgctgtccagaccacgaatactaacgcccttacggttatccccttcgttcgtcagttgtacgccaggcacttctttgaggacatccttcagattctgtaccggttttcgctgcaggtcttcctgggtaatgacgctgatactggcaggtgcatctttaagattttgttccacggaagatgcagtgacaaccatcgtttcgccatcatcatcgaccgctaacacaggccatgcacaagaaatagcggacaaacacagcccgacccgtacgaaagggttcaacctaaacattccatatctccatgaggtaactacgaaaataaaatgggttatcgctcacatcttcttcacgtccccttgcgtacggcagcatcgcggtggacttattttttatgcaggtgatcatcccagaaagccggaacagcctctgatttgtcagccttttttgattgcggcgtaacgataa

SEQ ID NO: 82 - protein, 332 aa, Escherichia coli
  complement of position 2759-3757 of seq id 81
MNKKVLTLSAVMASMLFGAAAHAADTRIGVTIYKYDDNFMSVVRKAIEQDAKAAPDVQLLMNDSQNDQSKQNDQIDVLLAKGVKALAINLVDPAAAGTVIEKARGQNVPVVFFNKEPSRKALDSYDKAYYVGTDSKESGIIQGDLIAKHWAANQGWDLNKDGQIQFVLLKGEPGHPDAEARTTYVIKELNDKGIKTEQLQLDTAMWDTAQAKDKMDAWLSGPNANKIEVVIANNDAMAMGAVEALKAHNKSSIPVFGVDALPEALALVKSGALAGTVLNDANNQAKATFDLAKNLADGKGAADGTNWKIDNKVVRVPYVGVDKDNLAEFSKK

SEQ ID NO: 83 - DNA, 12368 bp, Escherichia coli
  CDS (4397)..(5701)
cagagaatgtcttttcagcgcattcgcaggcagaaatgggaataatggcgatatatacggcagcaaaacgattttttgcttaagaaatcgtgagttaaggttgaaagagcaggtttaactcgaccatactctatactcgcagtgtggcgcggcgtagcatggcgcaacgcatggctatttgaaaaaggaaaatgtcgtggcagaagaaactatattcagcaaaattattcgtcgtgagatcccctccgatatcgtctaccaggatgatctggtaacggcgtttcgcgatatttcgccgcaagcgccaacgcatattctgatcattccgaatatcctcattccgactgtgaacgacgtctcagctgagcatgagcaggcgctgggacgcatgatcaccgtagcggcaaaaattgctgagcaagaaggtattgccgaagatggctatcgtctgatcatgaataccaaccgccatggcggacaagaggtttaccacatccatatgcacttgttgggtggccgtccgctgggaccaatgctggcgcataaaggtctgtaacgatgagaaaaggatgctttgggctggtgtctctggtgttgttactgctggtgggctgtcgttcacatccggaaattccggtgaatgatgagcaatcgctggtgatggagtcatctttattggctgcgggcatcagtgcagaaaagcccttcctttcgacgtctgatattcaaccttcagcatcctcaacgctttataacgaaaggcaagaacccgttaccgttcattatcgtttttactggtatgacgccagagggctggagatgcatcctctggaaaggccacgcagcgttaccattcccgcacattcggcggtaacgctgtacggcagcgccaattttctgggggcgcacaaagtcagactttatctatatttgtaaggggtgaatcttgatgacaaaaatgagtcgctacgccttgattaccgcgctggcgatgtttctcgccgggtgtgtggggcaacgtgaacctgcaccggtagaagaagtgaaaccagcgccggaacaaccagccgagccacaacagcctgtccccacagtgccctcggtgccgacgatcccgcagcagccaggcccaattgagcacgaagatcaaactgcaccgcctgcgccgcatattcgccattatgactggaatggcgcaatgcagccgatggtcagtaagatgcttggggctgacggggtgactgcgggtagcgtcctgctggttgatagcgttaacaaccgtactaacggttcgctgaatgccgcagaagcgaccgaaacgctgcgaaatgcgctggctaataacgggaaatttaccctggtttccgcccagcaactgtcgatggcgaagcaacagttaggtttgtcgccgcaggacagtttaggcacccgtagtaaagccataggcattgcccgcaatgtcggcgctcattacgtgctgtactccagcgcctctggcaacgttaacgctccgaccctacaaatgcagctgatgctggtgcagacgggcgaaattatctggtcaggtaaaggtgccgtttcgcagcaataatcccatcacgcgcgacgaattgctgtcgcgctttttcccgcagtatcatcccgtcacgacgtttaatagtgggcttagtggcgggagttttctcattgaacatcagggccagcgttttgttgtgcgtcagccgcacgatcctgatgcgccgcagtccgcgttcttgcgccagtatcgggctttatcacaactacccgcatgcattgcaccgaagccgcatttatatctccgtgactggatggtagtcgactatctgcccggcgcggtaaaaacgtatttgccggataccaacgaactggcaggcttgctgtattatctacatcaacaaccacgttttggctggcgaataacgctgttgccgttactggaactgtactggcagcaaagcgatccggcgcggcggacagtgggttggctgcgaatgttaaaacgtctgcgcaaagcgcgggaaccacggcctttacgcttaagtccattgcatatggatgtccacgccggaaatttagtgcatagcgcgtcagggttaaaactcatcgactgggagtatgccggagatggtgatatcgcgctggaactggcggcggtgtgggtggaaaatactgaacagcaccggcaattggtcaatgactatgccactcgcgcgaagatttatccggcgcaattatggcgtcaggtcaggcgatggtttccctggctgctgatgctcaaagcagggtggtttgagtaccgctggcgacaaaccggcgatcaacaatttatcaggctggccgatgacacctggcggcagctattaataaaacaataaggagagcagtgtgggtccagtaatgttggatgtcgaaggttacgaactggacgcggaagagcgtgaaatactggcgcatccgctggtgggagggctgattctctttacgcgtaactatcatgatcctgcccagttacgtgaactggtgcgccagatccgcgcagcttcgcgcaatcgtctggtggtggcggttgatcaggaaggtggacgcgtgcagcgttttcgtgaaggttttacccgcttgccagcggcgcaatcattcgctgcgctgtcaggaatggaagagggtggcaaactggcgcaggaggcaggttggttgatggccagcgaaatgatcgctatggatattgatatcagctttgcgcctgtgctggatgtcgggcatatcagcgcggcgattggcgagcgttcttatcatgccgatccacaaaaagccctggcaattgccagccggtttattgatggtatgcatgaagccggaatgaaaacgaccgggaaacacttcccaggacacggtgcagtaacggcagactcacacaaagaaacaccgtgcgatccacgtccacaagcggagattcgcgctaaagatatgtcggtcttcagttccttaatccgcgaaaataaactcgacgccattatgcctgcgcatgtgatctacagtgatgttgatccgcgtccggcgagcggttctccctactggctgaaaaccgttttgcgtcaggaactgggttttgacggcgtgattttctctgacgatttatcgatggaaggtgccgcgattatgggcagttatgccgaacgcgggcaggcttcactggatgcgggttgcgatatgatcctggtctgcaataatcgtaaaggggccgtcagcgtgttagataatctgtcaccgatcaaggcagaacgtgttacacgtttgtatcataaaggttcattttcgcgacaggaactgatggactcggctcgctggaaagcgatcagcacccgtctgaatcagttacatgaacgctggcaggaagagaaagcaggtcactaaccctggcttatgtgaggaagcgatgattatctatttacacggttttgactctaacagtccgggtaaccacgagaaagtcttacaattgcagtttattgacccggatgtacgcttgataagctacagtacgcggcatccgaaacatgatatgcagcatctgcttaaagaagtggacaaaatgttgcaactgaacgttgacgagcgtccgctaatttgcggcgttggcttgggcggatactgggcggaacggattggttttctttgcgacatccgccaggtgatcttcaaccctaatttgttcccttatgagaacatggaaggcaagattgatcgcccggaagagtatgccgatattgccactaagtgtgtgaccaacttccgtgagaagaatcgcgatcgttgcctggtgattttgtcgcgtaatgatgaagcgcttaacagccagcggacatctgaagagttgcatcattattacgagattgtctgggacgaagagcagacgcacaaattcaagaatatctccccgcatttacagcgcattaaagcgttcaaaaccctcgggtaaatgccctcgtcgcatcaggtaaccttgccggtacctgatgcgctccgaattctgtgggtcggataaggcgtccacgccgcatccgacagtcgagcatcaatgcctgatgcgcttcttatcaggcctaccgaacgccctgcatacacccctcactctatatcactctcacaaattcgctcaaataataaacaataaactctgttttttgatctcacccggtaaagtcgcctatcttttcagcaacaaaacttgattaacatcaattttggtatgaccaatgcaccattcatgttattctcaatagcgaagaacattttcattgctgtaacctgttgttaattaagagctatgttaataaccattaattaacaattggttaataaatttaagggggtcacgttgactacgccattgaaaaagattgtgattgtcggcggcggtgctggtgggctggaaatggcaacacagctggggcataagctgggacgcaagaaaaaagccaaaattacgctggtcgatcgtaaccacagccacctgtggaaaccgctgctgcacgaagtggcgactggctcgcttgatgaaggcgtcgatgcgttgagctatctggcccatgcgcgcaatcatggtttccagttccagctgggttccgtcattgatattgatcgtgaagcgaaaacaatcactattgcagaactgcgcgacgagaaaggtgaactgctggttccggaacgtaaaatcgcctatgacaccctggtaatggcgctgggtagcacctctaacgatttcaatacgccaggtgtcaaagagaactgcattttcctcgataacccgcaccaggcgcgtcgcttccaccaggagatgctgaatttgttcctgaaatactccgccaacctgggcgcgaatggcaaagtgaacattgcgattgtcggcggcggcgcgacgggtgtagaactctccgctgaattgcacaacgcggtcaagcaactgcacagctacggttacaaaggcctgaccaacgaagccctgaacgtaacgctggtagaagcgggagaacgtattttgcctgcgttaccgccacgtatctctgctgcggcccacaacgagctaacgaaacttggcgttcgcgtgctgacgcaaaccatggtcaccagtgctgatgaaggcggcctgcacactaaagatggcgaatatattgaggctgatctgatggtatgggcagccgggatcaaagcgccagacttcctgaaagatatcggtggtcttgaaactaaccgtatcaaccagctggtggtggaaccgacgctgcaaaccacccgcgatccagacatttacgctattggcgactgcgcgtcatgcccgcgtccggaagggggctttgttccgccgcgtgctcaggctgcacaccagatggcgacttgcgcaatgaacaacattctggcgcagatgaacggtaagccgctgaaaaattatcagtataaagatcatggttcgctggtatcgctgtcgaacttctccaccgtcggtagcctgatgggtaacctgacgcgcggctcaatgatgattgaaggacgaattgcgcgctttgtatatatctcgctataccgaatgcatcagattgcgctgcatggttactttaaaaccggattaatgatgctggtggggagtattaaccgcgttatccgtccgcgtttgaagttgcattaatcgacgtacactggcggatgtggcataaacgcctcatccgcccttgaggaacagcgcgatcggcagccgcgttgtatcaggcatcctttcagactcctccgaatccttaagtatttccagccattcccgcgcttttcatcttctgtctgatagctgcttttctccttcgcttgcatgattggcataactgcaaagaaggaggtgttcccgtgaataaatcaatgttggcgggtatcgggattggtgtcgcagctgcgctgggcgtagcggcagtggccagtctgaacgtgtttgaacggggcccgcaatacgctcaggttgtttctgcaaccccaatcaaggaaacggttaaaacaccgcgtcaggagtgtcgcaacgtcacagtgacccatcgtcgaccggtgcaggatgaaaatcgcattaccgggtcggtgctcggcgctgttgctggcggcgtgatagggcatcagtttggtggtggtcgcggtaaagatgtcgccactgttgtgggggcgctgggtggtggatatgccggtaaccagatccagggctctctccaggaaagcgatacttacacgactacgcaacagcgttgtaaaacggtgtatgacaagtcagaaaaaatgctcggttatgatgtgacctataagattggcgatcagcagggcaaaatccgcatggaccgcgatccgggtacgcagatcccgctagatagcaacgggcaactgattttgaataacaaagtataacaaggctgtactctgcaatttggcccctcattcgctcaggctgaggggctttttttgcgacttatttcaccagttcgggccataaacgcaaagtcgttccggcaatctgcatcagtttttccagcgatgcaccttcgcgtgcgctgatcgacatcccctgaataatacaattaaggaattctgccagatgtgtcacgtcacagtggggcgggatttccccgcgcgcttgtcgttgacataaaaactgctgcaaagtgcgctcttgcatcgcatggcgtgatttcaacgtattggcgatatctcctgaatctggggagagggtggtgcagttgttgatcatgaagcagcctgccggggtgtctttgctggtaaagcagttggcgatggcagcaaaatagtcagccagcgcagactccacgcttttctcttcacaaaacagctgtgcttcatgcttagcggcaaaacgatcgatatagcggtcgagaacggcacgaaataacccctctttgttggtaaattccgcgtatagcgtgggcgctttggctccggtcgcttcgacgaggtccgcaagagaagtcgcttcataaccgtgttgccagaacaatttcatggccttatcaagcgcggcatccctgtcgaacacttttgggcggccacggcttttttttacacattgtgttgagtcagttgccatgatgccgttgtacctggtgactgtgaatgaaaggttattataaaaataatcacctccgttcaccagtccagatcccataaaaataattgctttctatttaactgaaatttaaagatttttaaattaattaatgattgttataaaaaatatcttgtatgtgatccagatcacatctatcatttagttatcgatcgttaagtaattgcttgcgacgtcattcatctgcataaggccactattatgaaaaacgtaaaaaccctcatcgctgcggcgattttaagctccatgtcatttgccagctttgcggctgtcgaagttcagtcaacgccagaaggccaacaaaaagtcggtacaatcagtgctaacgcggggacaaatctgggatcgctggaagagcagctggcgcaaaaagcggatgagatgggcgcaaaatctttccgtattacttctgtaaccggtccgaataccctccatggaacagcagtaatttataaataagcattaaccctcattaatgcctgctactgctgattttttccccgcgacatgccgtgtcgcggggatttttttatccgggctttacagcgtttgtgggctcacttgatgacggcggacatccaccggcatcccggaacggacatccatcacatgttgcatcacttcagcgtcagtttgtgctgcatctttaaatgattgcattgcgctattcagcgtaattggcagcagctgcggatcgtcatcaatcttctctgacagcggctgatgtacttcaaccagacgcgcaccgtttggttcggcagagacttttatcggagtgttgatgatattcactttggtgcctggggtgacctggctaaagagtgttttgatatcgtcatcccgcagacgaatacagccagaacttacccgcatgccaatgccgaaatcggcgttcgtaccatgaagcaaataaacgccgccataggccgccagacgaatcgcatgatggcccattgggttatccagtccagccggcactaccgcaggcaactcaattccctgtgctttataacgggcgcggatgtttgccgttggcgtccaggttgggtttgcacgtttgtctgaaacggtggtcaccattgtcggtgtcagcgtgtcaccacctaactgaccaatacctattggatacacggttaccgaatttttacccggcgggtagtaatagagacgcagctccgcaatgttgatcacaatgccttcgcgcggcgcatctggaagtagggtttgcaacgggatcgttaacacgctgcccgcgcgcggtacgtaaggatcaacgccggggttagcctgtaacagagcgagaaagccgacgttgtattttttggcgatggcttccagagaaccaccgtcattttccaccacatgaaatttgttttcgccaaccagacgactgcccgctggcggcagcggccaggtgttggcttttgccggtagcgccagcgccacggcagcggcgaacgtaaaaaacgttagccagcgagaaaaacgcgttttgatcatcaccaaaaatccataataaatataaggttattgtaataaacagataagcctgaattatggatggtgacagtgtcggatagtgcagggaagtgcaaagaatttgtaaatgttgcagatgggggcgcagaaacgcccccgatttaccattaagcgatcgcgttctcttccagttcacgcataaactggcgtacccattcgatacgcgttttccgctcactcaaatcctgaataaatttcaggcgcgtcggaccatcaaggcggtaatgctgcggctgtttttgcagcaaaccaatcaaccaggccggattaacgtgattcttctcggcaaattcgatcaccccgcctttctcattaccttccagcttcctgatccccagtttctgcgcttgctggcgcagacgggcaatatccagcagggtacgcgccggatctggcagcaggccgaagcgatcgataagctcgactttgatctcttccagttcgttttccgttttggcgctggcaatacgtttgtagaacgacagacgcgtgttcacgtcagggatgaaatcatctggcaatagcgacggcatccgcagctcgacttctgtttgctggctggtgagatcttccagcgacggctcgcgtccggctttcagtgcatcgacggcgttttccagcaactccatatacagcgagaaaccgatggtttccattgagccgctttgttcttcgccaagcagttcacccgcgccgcgaatctccagatcgtgcgttgccagcgcaaaacctgccccgagatcttccagcgaggcaattgcttcaagacgtttttgtgcatcggtagtcatcgcttttggatgcggtgtcagcaaccatgcatatgcctgatgatgcgaacgtccgacgcgaccgcgtaactggtgcagctgcgccagaccgaagtgatccgcgcgttcaatgataatagtgttggctgtcgggatgtcgatcccggtttcgataatggttgtacaaaccagcacgttgaaacgttgatgatggaaatcattcatcacccgttccagttcgcgctcgcgcatctgcccgtgaccgatggcgatccgcgcttctggcaccagttctgccagccgttcggcggctttctgaatgttttccacatcattgtagagataataaacctgtcctccgcgcaaaatttcacgcaggatcgcctcccggaccaccatgctgtcatactcacggacaaaggttttaactgccagacgacgggcgggcggcgtggcgataatcgacaggtcacgcattccgctcattgccatattcagcgtacgtgggatcggcgttgcagtaagcgtcagaatatccacgttcgcgcgcatcgctttaatgcgctctttatgacgcaccccgaagcggtgttcttcatcgacaatcagcaggcctaaatctttaaacttgacgtcactttgcagcagtttgtgcgtaccgatcagaatatcgattttcccttccgccacttccgcaaggatttgcgtctgctctttggcgctgcggaaacgggagatcatttcgatacgtaccggccagttggcgaaacggtcgcggaagttgtcgtaatgctgctgcgcgagaagggtggtaggcaccagcaccgccacctgcttgtggttatctactgccaggaaagctgcgcgcatcgccacttctgttttaccaaagccaacatcgccgcacaccagacgatccattgccagcggctgacacatgtcgctaagtaccgcattaatggcctgcgcctgatccggcgtggtttcaaacgggaagctgtcgcagaacaactgatactgctcacgatcgtgtttaaacgcgaagccctctttggcggcgcgttgcgcgtagatatccagcaattccgccgccacatcacgcactttttccgccgctttctgccgcgcgcgtgaccacgcatcgccgccaagtttatgcagcggggcgttttcttccgcgccacctgcgtaacggctaatcagatgcagtgacgacaccggaacatacagtttggcgtcgttggcataggtgagcatcagatactcgccagtaatgccacccgcttccagcgtggtcattccggcataacgaccgacgccgtgctccagatggaccaccggctgaccaatatgcagttccgcaaggttacggatcagtgtatcggggttgatggtgcggcgagaatcctgacgacgacgggcaacgcgttcaccgagcagatcgctttcgcaaatcagcgccagattacgcaccgtatcgacaaaaccatgttcggcagcgccaatcatcagataacgcccacggtcgctggcttcatcaagacgcataatgcgttgcggagcaattttaattcgtgcgagcagttcacccagcgcttcacggcgaccttcactttctaccgagaacaccaccggaccgtcgaaagtctcgaggaacttacgcagcgcatccagcggcgctttttgttgtgcctgaacggccaggtctggcagtttctggaaacctaaattggcattcgcggcttttgtcggtaaatgttcagtttttagctgcacccggggccagtttttcagctctgagaagagctcgtccacccgcagccagagcgattgtggtggcaacagcgggcgcatcggatcgacgccgcgattctcaaaacgcgccagcgtgtcagcctggaaacgttcggcactggtttccagatcgccagtattcacgagcaaggtattggcagggaaataactgaacagcggcggcagtggttcgctgaagaacaatggctgccagtactcgatcccggcaggtaatgtgcctttactcacttgctggtaaatatgttctggatcgcgcttcacttcgaaggtatcgcgccactggctgcggaacagttcaattgccgctttatcggtcggaaattcgtgcgcgggcagcagattgatcgcttctacttcctccagcgtgcgctggctgtcgacgtcaaacacccgcaggctgtcgatttcatcatcaaagaaatcaagacgataaggcagctcactccccatcgggaagagatccagcaacgcgccgcgcgtggcgtattcgccgtgctccatcacctggtcaacatggcgataaccggcgctgtccagttgggttcgtaatgcatctcgtgacaggcgctgaccttttttcatcaccagcgcatgaccgtggagaaaactgtgtgggcaaacgcgctgcataagcgtattcaccggaacaatcagtacgccacgctgcatcgtcggtagctggtaaagggtggaaaggcgcgaggagataatgtcctgatgaggcgaaaaactgtcgtagggaagagtttcccagtccgccagattcatcaccatttgatcggtaaactggctgatttcatcatgcaaacgcagagcattttgcatatctggtgcaatgagtaccaccggaccggcgtgacgttcggcaatttccgctaccagcgttgcacaggctgcgccggttaactcgcccagcagacgctgctcacccgctttgacgggcagcgtataacgatattgttcaggcataacggttgtcagattctcgttaggatatgcctcaacatatgggggcatatctctgataagcaatgctgttcattatccgtaatcgacatggt

SEQ ID NO: 84 - protein, 434 aa, Escherichia coli
LTTPLKKIVIVGGGAGGLEMATQLGHKLGRKKKAKITLVDRNHSHLWKPLLHEVATGSLDEGVDALSYLAHARNHGFQFQLGSVIDIDREAKTITIAELRDEKGELLVPERKIAYDTLVMALGSTSNDFNTPGVKENCIFLDNPHQARRFHQEMLNLFLKYSANLGANGKVNIAIVGGGATGVELSAELHNAVKQLHSYGYKGLTNEALNVTLVEAGERILPALPPRISAAAHNELTKLGVRVLTQTMVTSADEGGLHTKDGEYIEADLMVWAAGIKAPDFLKDIGGLETNRINQLVVEPTLQTTRDPDIYAIGDCASCPRPEGGFVPPRAQAAHQMATCAMNNILAQMNGKPLKNYQYKDHGSLVSLSNFSTVGSLMGNLTRGSMMIEGRIARFVYISLYRMHQIALHGYFKTGLMMLVGSINRVIRPRLKLH

SEQ ID NO: 85 - DNA, 11045 bp, Escherichia coli
gaaatttgtgttagttcaataaaaacaatcagatgagactaatcatctcttcagcattagcgttatgaatgagtaatataaatcgataataccgccgctgggatatcgcgtattttcacccattgacaatgtttttggcggtggcatgatgcgcatgaaatttgaacttcctcacggttttaattcatgtccacgtatacccagcctgtcatgcttttgctgtctggcctgcttttgttgactctggcgattgcggtgttaaatacactcgtgccgctttggctcgcccaggaacacatgtccacatggcaggtaggcgttgtcagctcatcctattttaccggcaaccttgtcggtacattgctgacagggtatgtcattaagcgcattggctttaaccgcagctattatctggcctccttcatttttgccgctggctgtgccggccttggcctgatgattggattctggagctggttggcttggcgttttgtcgcgggcgtcggctgtgccatgatttgggtggttgttgagagcgcgctgatgtgcagtgggacgtcacgtaaccgtgggcgtttgcttgctgcgtatatgatggtttattacgtgggaacgtttttaggccagttactggtcagcaaagtttcaaccgagctgatgtccgtattgccgtgggttacaggtttgacgttggcagggatcttaccgctgttgtttacgcgtgtgctgaatcagcaggctgaaaaccatgattcgacgtcaattacgtcaatgctaaaactccgtcaggcgcggcttggcgtgaatggctgcattatctcaggaatcgttctgggatctctatatggcctgatgccgctgtacctcaatcacaaaggggtgagcaatgccagcattggtttctggatggcggtactggtcagtgcgggtatccttggacaatggccgattggacgtctggcggataagtttggtcgactgctggtgttgcgtgttcaggtctttgtcgtcattctcggcagtatcgcgatgcttagccaggcggcgatggccccagcgttattcatcctcggtgccgctggctttacgctatatccggtggcgatggcatgggcttgcgagaaagttgaacatcatcaactggtggcgatgaaccaggccttactgttgagctatactgtgggaagtctgcttggcccgtcatttaccgctatgctaatgcagaatttctccgataatttattgtttatcatgatcgccagcgtatcgtttatctatttgctgatgctgctgcgcaacgccggtcatacgccgaaacccgttgctcacgtgtaaatgaattcaagcagagtgtgaacttactgtttcacactctgcttttttgtttcttctatctgacttgctttattccaaattttattcgtttaaaaataaaatgtgcagcaggttataattttgcatttcgctatttccgcacttcttatttgccgcgcataatccctcgttttaccgatgcccctttaattttggcgaaggatttgtctatggctgggaatgttcaggaaaaacagttgcgatggtacaacattgcgctgatgtcttttatcactgtctggggttttggcaacgttgttaataactatgccaaccaggggctggtggttgttttttcatgggtgtttatctttgcactctatttcacaccttatgcgctaattgttggtcagttaggctcgaccttcaaagatgggaagggcggggtcagtacctggattaaacacacgatgggacccggactggcttatctcgccgcgtggacctactgggtggtgcatattccctatctggcacaaaaaccccaggcaattctgattgcgctcggttgggcgatgaaaggcgacggttcgctaatcaaagaatattcagtcgtagcgttacaggggttaacgctggtgctgtttatcttctttatgtgggttgcttcacgcggtatgaaatcgctgaaaatcgtcggttctgtggcagggattgctatgtttgttatgtcactcctgtatgtggcgatggcggtaaccgcgcctgcaattactgaagtgcatattgcgaccacaaacattacctgggaaacgttcattcctcatatcgactttacctacattaccactatttcaatgctggttttcgcggttggcggagcagagaagatttctccttacgttaatcaaacgcgcaacccaggaaaagaatttccaaaagggatgttatgcctggcggtgatggttgcggtttgtgccattctgggctcgctggcgatggggatgatgtttgattcgcgtaatatcccggatgacttaatgaccaacggtcagtattacgcctttcagaagctgggcgagtattacaacatgggtaatactttaatggtgatttacgccattgcgaataccctgggacaagtagcggcgctggtattctcgattgatgccccgcttaaagtgctattaggtgatgctgacagcaaatatattccagccagtttatgtcgtaccaacgcttctggtacgcccgttaatggctattttctgaccctggtactggtggcgattctgattatgctgccgactctcggcattggtgatatgaacaatctctataaatggctgttgaaccttaattcggtagtgatgccgctgcgttatttatgggtatttgttgcatttattgcagtcgttcgcttggcgcagaaatataaaccagaatatgtctttattcgtaataagcctctggcaatgaccgtcgggatttggtgttttgcctttaccgcctttgcctgtttgacggggatcttcccgaaaatggaagccttcactgcagagtggaccttccagttggcgctgaatgttgcaacgccgtttgtgctggtaggattaggactgatattcccgctgctggcgcgtaaagcgaatagtaaataattattgtggtcggtgacgctgactctggcagatctgacccgtttttacataatcgagaaatgcgcgcaagccgcaggacatatactggcggtttggataatagatctggaagcctggacgctctgtgctccagtcttccagtacacattctaaacgaccagtatcaaggtactccttgatctgttcatagagcagatacccgataccagcacccatcaaaacggcctccagttcagcatcaacatcatccagaatgatatttcctgcgacagcaatttccagctcctttgcaaattgccagtggaaaggtttgccgctgggataacgaaaaacaacacattgatgattaagcagatcatgaggatggcggggtttgccatatcttgcaaagtactctggcgttgctgctacacataatttcactggcgggccgatcgccacgctgatcatatctttttcgacgatgcaactaagtcgaacgccagcgtcaaagccctgttggacgatatcgacaagagagtcgtcagttgtgagctcgactttaatatcaggatattcacgtgtgaaaccaaccagtaaagacattaaaaatatacgtgcagctacccgggcggcattgattttgagcgttcctgtcggtgtcagacgaaaatcattcatctcatctaacatgatctgaatttcgtcgaaagctgggcgcaatcgttcatagagattagaacccgcttccgttaacgatacgcttcgggttgtccgattgaataagcgaattttaagacgttgttccagtgttttaatactatggctaatggcggacgaggataagcctaactcatcgcccgctgcacgaaagctttgattacgggccacggcaaagaaagtggcaaagtcagacatattcatccgcattagtgaaaatccttcattaactcatcctgaatcatcacgtttacaggattatgccgcctgcgtaaagtgcgctccagaacttaacgtggaggtaaaattatgcagtctgaacgtatttatttggtatgggcccatcctcgtcatgattcattgaccgcacatattgctgatgcgatccatcagcgggcaatggagcggaaaatacaggtgacggaactcgatttatatcggcgtaatttcaacccagtgatgacgccggaagatgaaccagactggaagaatatggataaacgttattctccagaggttcatcagctttattcagagctgcttgaacatgacacgttagtggtggtttttcctctctggtggtacagcttcccggcaatgctaaaaggatatattgacagagtatggaataatgggctggcttatggagatgggcacaaattaccattcaataaagttcgttgggtggcgctggttggaggagacaaagaatcatttgtccagatgggctgggaaaaaaatataagcgattatttaaaaaatatgtgcagttatcttggtattgaagatgccgatgtcactttcttgtgtaatacagtggtattcgatggggaagaacttcacgcgagctattatcagtcgttattatctcaggtacgggatatggtagatgcactataagatgtgttaaaaacgctgtagcagaatgaagcgcggaataaaaaagcggcaactcaataaagttgccgctttacggggaaattagaacattaccttatgaccgtactgctcaagaatgcctttcacgcgttccatggtctctttcttcggtggtttaacaccgtcgagtttgtactcttcacccattgccacccatttgtgtttgcccagctcgtggtaggggagaagctcgattttctcaacgttgcccatatcacgggtaaattcaccgaggcgatgcgctgaatcgtcatcgtcagaccagcctgggacaacaacgtagcggatccacaccttcacatttttgttcgccagatatttagcgaactccagcgtgcggtggttggaaactccaaccagattttggtggatctcgtcgttcatctgtttgagatcgagcattaccaggtcggttacttccagcagttcatcaatcaccggatcgtaacgacgaacaaaaccgttggtgtccagacaggtatgaatgccttcttttttgcaggcgcggaaccagtcacgaacaaactcagcttgcaggattgcttcaccgccggatgcggtaacgccgccgccggaagcgttcataaagtggcgataggtcaccacttccttcatcaaatcttcaacggtaacttctttaccgccatgcgtgtcccaggtgtcgcggttatgacaatacaggcagcgcatcaggcagccctggaaaaaggtgataaagcgaatacctgggccgtctacggttccacaggattcaaaggagtgaatgcgaccaataactgacattgcggtgtttctccagatgtggcccatctgaggccgtgttggtgcgcagctcgaaggctacgtcgagtctgttttggcagtcaccttaaagtatagatagctgacaaaaaaggctctcgcgctaaaaaaggccccactttcgtggagcctttattgtacgctttttactgtacgatttcagtcaaatctaattacatagattgagtgaaggtacgagtaataacgtcctgctgctgttctttagtcagcgagttgaaacgtactgcgtagccagatacacggatggtcagctgcggatatttttccgggttttccatcgcgtcgagcagcatttcacggttcatcacgttaacgttcaggtgctgaccaccttcgatggatgcttcgtggtggaagtaaccatccatcagaccagccaggttggtcttacgaacttcgtcgtctttacccagtgcgttcggaacgatagagaaggtgtaggagataccatctttagcgtaagcaaacggcagtttagcaacggaagtcagagaggctactgcacctttctggtcacgaccgtgcatcgggttagcacccggtccgaacggcgcgccagcacgacgaccgtctggggtgttacccgttttcttaccatacacaacgttagaagtgatggtcagaacagactgagtcgggatagcgtcacggtaggtgtgcagtttctgaattttcttcatgaaacgttctaccaggtcaacagccaggtcatctacacgcggatcattgttaccaaactgcgggtattcgccttcgatttcgaagtcgatagccagaccgtcttcgtcacgaatcggtttaactttcgcatatttgattgcagacagggagtcagcagcaacggacagaccagcgataccacacgccatggtgcggataacgtcacggtcgtgcagcgccatcagagaggcttcgtagctgtacttgtcgtgcatgtagtggatgatgttcagtgcagtgatgtactgtttagccagccagtccatgaagtgatccatgcgctccatcacttcatcatagttcaggacatcgcctttgatcggttcagacttcggaccaacctgcattttcagtttttcgtcaacgccgccgttgattgcgtacagcatggttttcgccaggtttgcacgcgcaccgaagaactgcatttgtttaccaacgatcatcgggcttacgcagcaagcaatagcgtagtcatcgttgttgaagtccggacgcatcaggtcatcgttctcatactgcagagaagaggtgtcgatggacactttagcggcgaatttcttgaagttcagcggcagtttttcagaccacagaatggtcatgttcggttccggagacggacccatggtgtacagggtgttcaggaaacggaagctgtttttggtaaccagggtacgaccgtcgaggcccataccaccgatagattcggttgcccagatcgggtcgccagagaacagttcatcgtattccggagtacgcaggaagcgaaccatacgcagtttcatgaccaggtggtcaaccatttcctgcgcttcttgttcggtgatcttgccagctttcaggtcacgttcgatgtacacatccaggaaggtggaggtacgaccgaaggacattgcagcaccgttctgagacttaacagcagccaggtagccgaagtaagtccactggatagcttcctgagcgttggtagccggaccagagatgtcgtagccgtatttcgcagccatttctttcatctgacccagagcgcggtgctgttcagcgatttcttcgcgcagacggatagtctgttccaggtttacgccgttttccagatcagcctgcagagaagtgaactgtgccagtttgtctttcatcaggtagtcgataccgtacagcgcaacgcgacggtagtcaccgatgatacggccacggccatatgcatctggcagaccggtcagaacaccagatttacggcaacgcaggatgtccggagtgtaaacgtcgaacacgccctggttgtgagttttacggtattcagtgaagatttttttgatcatcggatccagttcgcggttgtacgctttgcaggaaccttcgatcattttgataccaccgaacgggataagagcacgtttcagcggagcttcagtctgcagaccaacgattttctcaagctgcttgttgatgtagccagcgtcgtgagaggtgatggtggaagcaacagcggtgtcaaagtcaactggcgcgtgagtgcggttttccagtttaacgccttccattactttgtcccacagggtggtggtcgcttcagtagcgccagccaggaaggactcgtcaccctcgtacggagtgtagtttttctgaatgaagtcacggacgtttacttcattctgccagtcacctttggtaaaaccttcccaggctgtggctaacttttcattaagctcggacatgtaacacctaccttcttaagtggattttttatttactgcgtacttcgacaaccattaatggtggtcgttttcacgcaggtaaatgacccagtatgtcaacccaaccaacaaaccaccaccgataatgttgccgatcgtaaccggaatcaggttatcagtgatgaaattcatcacggtcaggtgagaaaaattttccggtgcagaaccgactgcggtccaaaattccggggatgcgaagtcgcggattacaatacccatcgggatcataaacatgtttgcgatactgtgctcaaaaccgctggcaacaaacatcgcgaccggcagcaccataatgaacgctttgtccatcaggctgcggccagaataactcatccatactgccagacataccatcaggtttgccaggataccaagacagacggcctcaataaaagtatggtgcactttgtggtcggcggtttgtaggacgtttagtccccattgaccatttgcggtcatatactcgccggaaagccacattaaaagtacaaacagcagtgcgccgaccaggttgccaaaatagacatttagccagtttttcgccaactgaccccaggtgatgcgcccactcgccttagcaacaacaatcaacacggtggaagtaaagagatcggctccgcagacaacacaaagaatcagccccagagagaagcaaatgccgccaaccagttttgccatgccgaagggcattgtgcctgtgccagtggttgctgtgatatagaagacgaatgcgattgagatgaaaacaccggcggtaatcgccagatagaaagtcttaagcggatgtttcgttgctttatagacacccgcctcttcggccactttggccattgcagcaggaagtaaaagatcaaaagggttgtcagctttcacactaactctctctttattaagtcggcgacgagatactaacaaagcattatagatgagaaattgatatagatcatatctcgcctggcttataggcccgtaactcgcatggtttttatgcaaatacggagtaaatatttgattatccaaataaaaataaattttaaaaattaacaaatgagttgaattttttccgcatcctccgctaaaacagttaattaaaagggagcatcaggcgaataaagtaacaatatcgatcgtatttattaaatacaaattaccgatatttaaccttataattacaattattttattaatgcaaatatatgtaaagcggggcattaaaaaaacgccccgtaatataactcagactaatcattaagcctacattgcgtaggctatttgattttattttgcccagaatgctgctttggcgcgctgcagcttttcgtaggccttcaacaacgactgatgtgcagcaaacgcgtgcagatcgctatctaccggttgcaggccgtaaaacgccgcttcgccgctcattgccgcactggcggcttctacggcatctgcgccgtacatgcgaacaaacgcattcagatattgcagcggctggcgatcttcttcctgtgccagtaataacaacgtttgcaggcagcgataatagttggcgcgttccggactaaatactgatgagttaaactccatcgtccattcggtccagaccagagcctgttccagatcgccaccagccagcgccagcatggcttttaattcaccgatacgcagggtgtaccaaccgttatccgacccggtcgccagacccaacagctcacgcacgcgggtaaagtcatcaaaaccttcttcatccagttgctcgatgaggttcaggtaatcttctttttcccactcgctgcctggtagcgaaagaatcgtttcacgtaaatggctgcccatactgttattcgcgagccacagatcttcagccggataaatatcggacatgccaggcacgataatacggcaagcataaacgcccagatgctcgtaatcggcaatataaacttctttatcttctttgttgaagatagccatcagtgtggcgaactcttcttccgtggtgccggagaaattccagtccacaaacggataatcggcatcctgcttgaacaggtcccaggagattaaaccgctggaatcgataaagtgcgtttcgaggttggtatgttcagcgacttcttcatcatcgaaggttggcggagtaaacacatccaaatctttcaggccacgaccttgcagcagctcggtcacggtacgttccagtgctacgccaaaatcaggatgcgcaccgaaagaggcaaagcaggtaccgttagcaggattgaacagtaccacgcaaatcaccggatactggccgccaagcgaaccgtcataagcgaagattgggaaaccctccgcttccagcgtttcgatggcttcaactactgctgggtaacgcgccagcacgtctgccgggatctctggcaggctgatgctttcagcaataatgcggtttttcacgtagcgttcgaaaacttcagacaatccctgaacgcgtgcttcgttgcgggtattacctgcggacataccgttggagacgtacaggttaccaatgatattcatcggaatataaacggtctgattgtcggactgacgcgtaaacggcaggccgcaaataccacgatcttcgttaccggattgtaggtcaatcagcatgctgccggtcagttcattctccggatcataaaacgcgcgcagacggtcatcgagcagcccttctggcacatcgtcattttcggtcagtgggaaccatttttcgttgggataatgcacgaacggaccgttggcgatggtttcgcccagccagaagtccgcaaaaaagtagttggttgagagacgctcgaaatattcaccgagtgcagaagccagcgccgctttcttggttgcgcctttaccgttggtaaaacacagtgcgcactctttgtcgcgaatatgtacagaccagacgttaggcacgggattcagccaggaggcctcttcaatctgaaagccgaggtctgaaagtttttgctggaagcgagcgatggaatcttccagagcggcatctttgccggggataaatgtttgcgtcatgaaaatcactttagtcgtacggaaagcgcgcaataatacgggttttatctcaaaggcgctatcaccgccgccatgccgatgaactgttgactatgct

SEQ ID NO: 86 - protein, 760 aa, Escherichia coli
MSELNEKLATAWEGFTKGDWQNEVNVRDFIQKNYTPYEGDESFLAGATEATTTLWDKVMEGVKLENRTHAPVDFDTAVASTITSHDAGYINKQLEKIVGLQTEAPLKRALIPFGGIKMIEGSCKAYNRELDPMIKKIFTEYRKTHNQGVFDVYTPDILRCRKSGVLTGLPDAYGRGRIIGDYRRVALYGIDYLMKDKLAQFTSLQADLENGVNLEQTIRLREEIAEQHRALGQMKEMAAKYGYDISGPATNAQEAIQWTYFGYLAAVKSQNGAAMSFGRTSTFLDVYIERDLKAGKITEQEAQEMVDHLVMKLRMVRFLRTPEYDELFSGDPIWATESIGGMGLDGRTLVTKNSFRFLNTLYTMGPSPEPNMTILWSEKLPLNFKKFAAKVSIDTSSLQYENDDLMRPDFNNDDYAIACCVSPMIVGKQMQFFGARANLAKTMLYAINGGVDEKLKMQVGPKSEPIKGDVLNYDEVMERMDHFMDWLAKQYITALNIIHYMHDKYSYEASLMALHDRDVIRTMACGIAGLSVAADSLSAIKYAKVKPIRDEDGLAIDFEIEGEYPQFGNNDPRVDDLAVDLVERFMKKIQKLHTYRDAIPTQSVLTITSNVVYGKKTGNTPDGRRAGAPFGPGANPMHGRDQKGAVASLTSVAKLPFAYAKDGISYTFSIVPNALGKDDEVRKTNLAGLMDGYFHHEASIEGGQHLNVNVMNREMLLDAMENPEKYPQLTIRVSGYAVRFNSLTKEQQQDVITRTFTQSM

SEQ ID NO: 87 - DNA, 14759 bp, Escherichia coli
gcagcccccgtcactgctggggttgagtcatcttgacgtctgctttacgggcggttaaggtgcctcttgtgcgccagaagtgcatataaacgataacattgacctgtagacttgattatcatggacaaattcgacgctaatcgccgcaaattgctggcgcttggtggcgttgcactcggtgccgccatcctgccgacccctgcgtttgcaacactctctaccccacgcccgcgcattttgacactcaataatcttcataccggagagtcaatcaaagcggagtttttcgatggcagaggctatattcaggaagaattggcaaaacttaaccattttttccgcgattaccgcgcgaacaaaataaagtccatcgacccaggattattcgaccagttgtatcgcctgcaagggttgttaggcacgcgcaaaccggtgcaactcatttccggttatcgttctattgataccaacaatgaactacgcgcccgcagccgtggagtagcgaagaaaagctatcacactaaaggccaggcgatggatttccatattgaaggtatcgcgttaagcaatattcgcaaagccgcgttatctatgcgcgcaggtggtgtaggatattatccacgtagtaactttgtgcatattgataccgggccagcacggcactggtagtaattgcttaacgaaacaggggcagtatgaactatcgtattattccggtcaccgcattctcccagaactgttcattaatctggtgtgaacaaacccgtctggccgcactggtcgatcctggcggcgatgcggaaaaaatcaaacaggaagttgatgacagcggcctgacactgatgcagatcctgctgacgcatggtcatctggaccacgttggcgcagcggcggaactggcgcaacattacggcgtgccggttttcggcccggaaaaagaagatgagttctggctgcaaggcttgcctgcgcaaagtcgtatgtttggtctggaagagtgccagccgctgacgccagatcgttggctgaacgaaggcgataccatcagcatagggaatgtgactttacaggtgttacattgccctgggcatacgccgggtcatgtcgtgttttttgatgatcgggcaaagctgctgatttctggcgatgttattttcaaaggcggagtagggcgcagtgacttcccgcgtggcgatcataatcaactgatttcttcaatcaaagataaattgctgccactgggggatgacgtgatatttattccgggtcacggaccattatccacacttggttatgaacgcctgcataatcccttcctgcaagacgaaatgcccgtctggtaaggcacataaaaaagcccgcttttaatgctggcctggatttctggcaaagtgcgctttgtttatgccggatgcggcacgagcgccttatccggcctacaaaatcgtgcaaattcaaaatattgcaggggacgcgtaggcctgataagcgtagcgcatcaggcaatgttgcgtttgtcatcagtctcagcccgcttttcagcgggcttcattgtttttaatgcttacagcactgccacaatcgcttcgcacagcggagccatgttatctggtgtcatcccggccacatttacgcgaccagaagcaaccgcatatacgccaaactcttcgcgcagacgcagcacttgttcttttgtcaggccactgaaggagaacatgccgttctgtttgatgataaagctgaagtcgcggtttgcgcctttttcctgcagcgtattgacgaacaactgacgcatacgctgaatacgctggcgcatatcagtcagctcttgttcccaaatcgcacgtaacgcatcgttgctcaggatggtggcaacaacagaagcgccgtgtgctggtgggttagagtagttagcgcgaatcgccgctttcatttggctgaatgcgcgatcaacggtttcactgtcggcagcaaccagagtacaagcgccaacacgctcgttgtacaggccaaagtttttagagtaggaactggcaacaatcagctctttatgcatagccgcgaaagcgcgcagtccttcagcatcttcttccagaccacgggcaaaaccctggtaagcgaagtcaaacagcggtaaccagcctttctcaacggagagttgtgccagtgtttgccattgttccagcgtagggtcgataccggttgggttatggcagcagccatggaacagcactacgtcgccagcctgagcttcattcaggctgttaatcagtgcatcgaagtcaagagtgtgattttccgcatcataataagcgtattcacgaacttccagacctgcagagttaaagacgctcttatggttcggccagcttgggttgctcacccacacacgcttaacgctggtattttttgccaggaaatcggcagccacgcgtagtgcgccagtgccccccggagtctgtgccgtgcgagcacgtttgtcattgatcagggcgctacctttaccaaacagcagttcctgagtgcagcgaccaaattcagggatgccgtcaatgccgaggtaatttttggtggtttcattttcgagcagatactgttcagcctttttcacgctggtcagtaccggggttttgcccgtctcatctttatagacaccaatcccgaggttaattttgccgggacgttcatcggcacgaaacagatcggccaggcccagaatcgggtcggcaggagcggcggtaatgttctcaaacatgacgaggttccattatggttacagaagggaagtccgctatcagggtaacgggagatttacaaaattccaactattactgatgaaaacgcaggctgtttttgcaagacgtgagattgctctggaaggtataaaaaaaacaggaccaaagtcctgttttttcggcatttaacaaagaggtgtgctattagaactggtaaacgatacccacagcaacggtgtcgtctgaacctacgcccagtttgttgtcagaatcgatctggttgatgatgtagtcaacataggtggacatgtttttgttgaagtagtaggttgcgcccacttcaaagtagttcaccagatcaacatcaccgataccttctacgtctttcgctttagatttggtgtaagcgatggacggacgcagaccgaaatcgaactggtattgcgcaactaacagaacgtcttgcgttttgttggcgaagccgctggtgtttgtaaatttattagtgatcggcgtagcgttacgggtttcaccgtagttcgctgccaggtagatgttgttcgcgtcgtacttcagaccagtagcccactgttcagcttttttaccgttgccaagaggttgagcttcttgcaggttggtacggtcagctgcaccataagcaccaacgataccaaagccttcgtattcgtagctgatagaaccgccaacaccgtcgccgttagaacggcgtgcagtgtcacgctcgtttttacccaggtactgaacagcgaagttcaggccatcaaccagaccaaagaagttggagttacgataggtagcaacgccgccaacacgaccaacgaagaagtcatcgctgtatgcagtatcaccaccaaattctggcagcatatcggtgtaacccagtgcatcataaaccacaccgtagttacggccgtaatcgaaagaaccaacgtcagcgtatttaagacccgcgaatgccagacgcgttttgttaccagtttgagcgtcagcgccttcagagttgttaccctggaagttatattcccactgaccataaccggtcagatcggaattgatttgagtttcccctttaaaaccaagacgggcataggtcatgtcgccattgccaccgtaactgttttcaccgttacccttggaaaaataatgcagaccaacagctttaccgtacagatctactttgttgccatctttgttatagatttctgcagcgtttgcagtacctgctactaacagagcagggacgatcactgccagaatattgcgcttcatcattatttattaccctcatggttttttttatgacacctgccactgccgtcaataagttctgtcaataaaaatttacggaactattgatgagagtttggtgtctttatgtgtctgcaggcatctttccattcaaactaacgtttcgctaccgtgaaagtgctacaaagataaagatttggtttcaaaaagaaaaaatatgtaaccaaaagtaaaatttaaggaactttgtgaacaccgtcatatttccatagagacgtgatgatatttacagcaattttaatctatttatatgatttccttatatttaaattaactaaacggaaattttgtttctgatggaaactttatcgacctggcacaaaatcttctttcagacatccagaatgccaaaaaatagtatgaaaattgtgctattagctaagaaaaaactaatccgcaataagaatgcggattagtttttgcgcgtaaatgttgcaatgtaatattccgtaacaggatgatcgttatggcggggttgcaaatagattgcttgacttaacaaacagataacttgacagaaaagataaaaaaagagccagcgggcgctggctcttgaagacgctaaattagaagctggcgttacgcggagtacgtgggaacggaatcacatcacgtacgttttgcacgccagttacgtaagcaatcagacgttcaaaaccaagaccgaaacctgaatgcggaacagtaccgtagcgacgcagatcgcgataccaccagtaatcttctttattcaggcccatttccagcatacgctcgtccagcacgtccagacgttcttcacgctgggagccaccaatgatctcaccgatgcccggagccagaacgtccatagccgcaacggttttaccgtcttcgttaaggcgcatatagaacgctttaatatctttcggatagtttttaaccactaccggtgctttaaagtgttcttccgccagataacgctcatgctcagaagagagatcgactccccagtaaaccgggttttcaaacttcctgccgcagttttcgagaatggtcactgcgtcggtataatccacctgcgcaaaatcggcttcaatgaagcgttccagacgtgaaacggcatctttatctacgcgttcagcgaagaatttcatgtcgtcagcgcgttcttcgagaaccgctttgaagacatatttcagcatggcttcagccagacccgcaatatcgttcaggttagcaaacgccacttccggctccagcatccagaattccgccaggtgacggctggtgttggagttttcagcacggaaagtcgggccgaaggtataaattttggacaatgcgcaagcgtaggtttcgccgttcaactggccagatacggtcaggaaagactctttaccaaagaagtctttgtcgaaatccactttgccctgatcgttacgcggcaggttttccagatccagcgtagaaacgcggaacatttcgcctgcaccttcggtatcagatgcggtaatcagtggcgttgaaacccagaagaatccctgctcgttaaagaagcgatgcagcgcctgcgccagcgtatggcgaacgcgcgcgacggcaccaatcaggtttgtgcgcggacgcaggtgagcgacttcacgcagatactcaatgctgtggcgttttgccgccatcgggtaagtgtctggatcttcaacccaaccagcaacttcaaccttgctggcctgaatttcaaattgttgcccctggcccggcgacgccacgactttacccgtcacaatgaccgagcagccggtggtcagacgcaggacgtcttcattgtaattgggcagagaattattgatgacagcctgtacaggatcaaagcaggaaccgtcataaacggcgaggaaggagatgccagcttttgaatctcggcgggtacgtacccatccgcgcacggtgacttcgctgtcaacggctacacggccctggagtacgtcggctacaggcacaacgctcataatattctctctgttaatagtcggaaaaaataaacacttgtccacccgtaaatggggggatacctatgttacctggcatctgcaatcagacaagcagaattcgcaaatgcagcgaaagatttcggaattaaaggtaaaaaaagggagccgattagctccctgatgatattaactggcttttttaatatgcggaaggtcgaacgctttgcgcagcgcccgaacaaacgctttatcatggcagatagttttgccagggctgtcagaaagtttcgccaccggtttaccgttacactctaccaacttaatgacaatattcaggggttttacctgggggatatcgcaggtcaggcgagtcccaataccaaaacttaattgcacgcgggaagagaagtggcggtatagctcaaccgctttgcgtaaatccagattgtcagagaaaaccagcgttttactctgtggatcaattcccagcttttcataatgtgcaatggctttttcaccccattcaaccgggtcgccagagtcatgacgcaggccctgataccgactagcgaactcgacaccgaaatcacgcaggaaagcatccatagtgatgcagtcggttaatgcaatgccaagttggtcgggatactcttccagccaggcagcaagtgcagctcgctggctgttggctagatccgggctgatttgctgatgtgcctggaaccattcgtgtgcctgtgttcccatcggcgtgagggaaagccgacgcgccagatcgtagttgctggtgcccacaaaccaggattcctgttgcagacgcttaacgatggtttcttgtacttcgcgagaaaaacggcgacgggtgccaaaatccatcagatggaagcgcgacatatcaagaccggcggttaacgccgagaagtcgactaatttgctttccagcgtgtcgagggcttgcgcaacgtcggcctgcggtgagcgatagcgatgtaccatttcactgataaccgccagcaaaggaacttcccagaggatgacttcacgccacgggccgcttaaacgaatatccagcttgccattatcgttggacacggtgacttgttccgggttaaagcggaactcgcgtaaccagttaagatagtcggccttaaagaaaggcagggcagaaagccactgatattcatcatcctgcaggcgcaggtgctgcatcgcctgaacctgttcacgaatagcatcggcataaatacccagcagatcgtcacctcggcaacgaaactccgccgcgacatgcacatcgtaatagtgatgaaacacggcttgctgcatatgcaacttataagcatctgtatccagcaacgagtgcagaacaggagaagcgaattgtgtcataggtgcgcagtagcgtcctcgtacaggagcgtttagtacaataaacatcttcaggaactgctggagtataccttgtttcgcaatttattgaaccccgatcacaccatatgccacctttctggtcgatggcattacgcggtgtatgttataaaaatgtagcaataaaggcgtttgtacctgaaaagatgaagattctgcatagcgcgatttacgcaacaggaatagactgaacaccagactctataaaagatgctaaaggttatttatgactcaacagccacaagccaaataccgtcacgattatcgtgcgccggattaccagattactgatattgacttgacctttgacctcgacgcgcaaaagacggtcgttaccgcggtcagccaggctgtccgtcatggtgcatcagatgctccccttcgtctcaacggcgaagacctcaaactggtttctgttcatattaatgatgagccgtggaccgcctggaaagaagaagagggcgcactggttatcagtaatttgccggagcgttttacgcttaagatcattaatgaaataagcccggcggcgaataccgcgctggaagggctttatcagtcaggcgatgcgctttgcacccagtgtgaagccgaaggtttccgccatattacgtattatctcgaccgcccggacgtgctggcgcgttttaccaccaaaattattgccgataaaatcaaatatcccttcctgctttccaatggtaaccgcgttgcgcaaggcgaactggaaaacggacgccattgggtacagtggcaggacccgttcccgaaaccgtgctacctgtttgcgctggtggcaggcgactttgatgtactgcgcgatacctttaccacgcgttctggtcgcgaagtagcactggagctgtacgtcgatcgcggcaaccttgatcgcgcgccgtgggcgatgacctcgctgaaaaactccatgaaatgggatgaagaacgctttggcctggagtatgacctcgacatctatatgatcgtcgcggtggatttcttcaatatgggcgcaatggagaataaggggctgaatatctttaactccaaatatgtgctggcccgcaccgacaccgccaccgacaaagattacctcgatattgaacgcgttatcggccatgaatatttccataactggaccggtaaccgagtgacctgtcgcgactggttccagctcagcctgaaagaaggtttaaccgtcttccgcgatcaggagttcagctctgaccttggttcccgcgcagttaaccgcatcaataatgtacgcaccatgcgcggattgcagtttgcagaagacgccagcccgatggcgcacccgatccgcccggatatggtcattgagatgaacaacttctacaccctgaccgtttacgagaagggcgcggaagtgattcgcatgatccacaccctgcttggcgaagaaaacttccagaaagggatgcagctttatttcgagcgtcatgatggtagtgcagcgacctgtgacgactttgtgcaggcgatggaagatgcgtcgaatgtcgatctctcccatttccgccgttggtacagccagtccggtacaccgattgtgaccgtcaaagacgactacaatccggaaaccgagcagtacaccctgaccatcagccagcgcacgccagccacgccggatcaggcagaaaaacagccgctgcatattccgtttgccatcgaactgtatgataacgaaggcaaagtgatcccgttgcagaaaggcggtcatccggtgaattccgtgctgaacgtcactcaggcggaacagacctttgtctttgataatgtctacttccagccggtgcctgcgctgctgtgcgaattctctgcgccagtgaaactggaatataagtggagcgatcagcaactgaccttcctgatgcgtcatgcgcgtaatgatttctcccgctgggatgcggcgcaaagtttgctggcaacctacatcaagctgaacgtcgcgcgtcatcagcaaggtcagccgctgtctctgccggtgcatgtggctgatgctttccgcgcggtactgcttgatgagaagattgatccagcgctggcggcagaaatcctgacgctgccttctgtcaatgaaatggctgaattgttcgatatcatcgacccgattgctattgccgaagtacgcgaagcactcactcgtactctggcgactgaactggcggatgagctactggctatttacaacgcgaattaccagagcgagtaccgtgttgagcatgaagatattgcaaaacgcactctgcgtaatgcctgcctgcgtttcctcgcttttggtgaaacgcatctggctgatgtgctggtgagcaagcagttccacgaagcaaacaatatgactgatgcgctggcggcgctttctgcggcggttgccgcacagctgccttgccgtgacgcgctgatgcaggagtacgacgacaagtggcatcagaacggtctggtgatggataaatggtttatcctgcaagccaccagcccggcggcgaatgtgctggagacggtgcgcggcctgttgcagcatcgctcatttaccatgagcaacccgaaccgtattcgttcgttgattggcgcgtttgcgggcagcaatccggcagcgttccatgccgaagatggcagcggttacctgttcctggtggaaatgcttaccgacctcaacagccgtaacccgcaggtggcttcacgtctgattgaaccgctgattcgcctgaaacgttacgatgccaaacgtcaggagaaaatgcgcgcggcgctggaacagttgaaagggctggaaaatctctctggcgatctgtacgagaagataactaaagcactggcttgataaataaccgaatggcggcaatagcgccgccattcggggaatttacccctgttttctcaggcgagtttcagattcaccacgttgcatcacccgttgcaacacctccgcttccagctccgctaatcgcaccgaccctaatcgacgcggacgggggatatccactgtcaaatccagaccaatttttccctcttcaattaacagcacccggtcagccatcgctaccgcttcgctcacatcatgcgtcaccaacagtacggtaaagccgtgctcctgccaaagtgacacaatcaaatcctgcatctcgagtcgcgttaaggcgtccagcgccccgagcggttcatcaagcaacaataatcccggtcgatgaatcaacgctcttgccagcgccactcgctgtttctgcccgccagaaagtgcggcaggccattcccctgcgcgattctccagtcctaccgcagccaacgctcgacgtgcggcatcgcgccactggcctttaaggcctaacccaacgttatcaatcaccgatttccacggtagcagacgcgcatcctgaaacatcattcgcgtgtcttcctgaatttcagccagcggtgtggtgcccgctaacacatcgcctgcggttggcgtttccagacctgccagcaggcgcagcagggtacttttgccaccaccgctgcggcccaccaccgccacaaactgacctgccggaatatgtaaatccagttggttcaggacgatattttccgcgtaatgtttgcttactgcattgagcaacaatggcgtgccctggttcagacgagcagtattcataccgtggcctccttcaaatgataagccgggttccagcgcaaccagaggcgctctaacagctgcgcgctgacgtcagccagtttgccgagcagggcgtaaagaataatagcgactaccaccacgtccgtttgcaaaaactcccgcgcattcatcgccagataaccaatgcctgaattggcagaaatggtttcggcaacaatcagcgtcagccacatcaggcccaacgcaaaacgcacgccgaccataattgagggcagggcaccaggcaggatcacatggataaacagcggtatgccggataatccatagctacgcgccatctccaccaacccgcgatcgatattacggatgccatgccaggtgttgatataaatggggaatagcgtaccgagcgccaccagaaagatttttgcggattcatcaatgccaaaccacaaaatcaccagcgggatcagcgccagatgcggcacgttgcgcaacatctgaattgaggtatccagcagccgttctccccagcgagatagcccgctaatcagtcccaaaatcaaccccagcgatccgccaattgaaaagccaatcagcgcccgccaggagctgatcgccagatgctgccacagttcgccgctggcggagagcgtccagaacgccgtcaccactccttccggtgaaggcaaaatacgcgtcgacagccagccaaccgaggaggccagttgccacaccgccacgatgcccaccggtaaaaaccagggggcaacgcgcaataaccacttcttcactggcgttgccattatttcttccttagctttgcgcgactttacgggggataaaatcattcgccaccgcttcgccttgcggattcagcggctgcggctggggaatttccgggatggcgacatccagaagcgggaacagcaactcgccaacccgatacgcttcttccagatgcggatagcccgaaagcacaaaactgtcgatgccaagcgcggcatattcgttgattcgcgcagcgaccgtaggaccatcgcccaccagcgccgtcccggcaccgccgcgcactaagccaacgcccgcccataaattggggctgatctccagattgtcgcgcttgccgttatgtaacgccgccattcgctgttgccctacggaatccgtccgggcgaatgcggcctgtgctttggcgatagtttcatcatcaagatgcgagattaaccgctcggcggcctgccacgcttcgtcgttagtttcacgaacaatcacatgcagacgaataccgaaacgaattttgcgtccatgcgcggcagctttcgcccgcacttgttcgattttctctttaaccagttccggcggttcgccccaggtgaggtagagatcaacctgttctgccgccagctcctgggcgacatctgacgatccgccaaagtaaagtggcggatacggctgttgaatcgccgggaagagcagttttgctccgcgcacatgaatatgtttaccgttgaaatcgacggtttctctctgcaataaacgccgccagacctgggtaaattccgccgaggcttcgtagcgctcgctatgatcaaggaacactccgtcgcctgccagctcttgtggatcgctgcctgtgaccaggttaaacaacgcacgtccatttgagagacggtcaagcgtggcggcctggcgggcggcaacggtaggtgaggttacgctgggacgcagggcgacaagaaacttcagccgctgcgtcaccgggatcatcgatgcggcaaccagccacgcatcttcgcaggagcgccccgttggaattagcacaccggtatagccaagacgatccgccgcttgcgcaatttgttgcagataaccgtgatcaaccgggcgtgaaccttcttccgttcccagataatgcccgtcaccgtgggtcggtaaaaaccagaacatattcagactcataattgttttccttccagttgagtgggctgccagatgcgctggcgaatatcgacttttttcggcaccagacgattttcataaaacagatctgccgtttgctgctgtaaggcggcaacctcggcgttaaccggtttgatggtggtaggagggcgatgatctaagtaagaggcaatcaccggtgccggtaagcccatcgtttttgccagtaaagcgatgctttgctcgcgctggctgcgggttaacgcatcggcctcactaaaggttgccagtacgccctgaataaaagcgccgtttttttctgcatagggacgagctgccagataaaacgatccagtttgattgagatcggtgccgtctttcagcacccgcacgccgccctgtaataatgcagcagagtagtagggatcccagatagcccaggcgtcaacgttaccttgctggaacgcggcgcgggcatcagcgggcgtcaggtaagtgggttggatatcggtaaacttaagtccggcctgacgcagtgcacgcagtaaaaggttgtgtgaactggaacctttctgaaaggcaactttgtgacctttaagatcggctacggttttgatcgggctgttttctgccaccagaatcacttcggctttgggcttcggtggctcgacgcccacgtacaccaaatcagccccggcagcctgggcaaagattggcggaatatccccggtactgccgagatcaatactgccaacgtttaacgcttccaacatttgcggacccgcggggaactccacccaggagatttttgattccggatagcgtttttccagtaactggtggctttttgccagcaccataccaatactgcctttctgatagcctatacgtaacgcttcaggcgaggattctgcagcaaccgcaaaagtagagacgctaagcaatcccgccagcgccagtttaatgatgttacgcatgggcattacctcgcagagacagaaggtcaggaacctgaacatcgcggcggtgcaatgcctgccagaaagtttctagcgcggtatcaagacgggtttgcagatttggcgtgaactggggtctgtgatggtaatcaattacttgtgagtcatcggcaaacacgccgtgcaggatctcctgagctttcagtgcgcttaaaactggtttaagggcataatcgaccgccagcagatgggccacggtaccgcccgtcgccagcggtagcaccactttgccttgcaaagcgcgttctggcagcaggtcgagcagggttttcaacgcaccggaataggcggctttatacacaggcgtggcgacaatcagcccatcggcctgttgcagctgttcggtgaaggtcttgagtgccggactatcgaaacgagcataaagtagatcttccggggcgaagttttgcagattccagtgataaacctctacatccaggccatttagtttttcccgcgcatattccagcaaggagctggagcgagaaggaaagcgaggactacccgccagggtgatgacacgcatactctctccttataaccaattgttctttttttgttaacattgataacaattcggtcagtctgtcggagagacaagaaaattccaaatataaattttgtgtatctttttctgaaaataaactaaagaaagggctttatatatcacgcatatttatttattggatagtcattagatgttgaatcaatgaattactcgttcagt

SEQ ID NO: 88 - protein, 432 aa, Escherichia coli
  complement of position 371-1669 of seq id 87
MGNNVVVLGTQWGDEGKGKIVDLLTERAKYVVRYQGGHNAGHTLVINGEKTVLHLIPSGILRENVTSIIGNGVVLSPAALMKEMKELEDRGIPVRERLLLSEACPLILDYHVALDNAREKARGAKAIGTTGRGIGPAYEDKVARRGLRVGDLFDKETFAEKLKEVMEYHNFQLVNYYKAEAVDYQKVLDDTMAVADILTSMVVDVSDLLDQARQRGDFVMFEGAQGTLLDIDHGTYPYVTSSNTTAGGVATGSGLGPRYVDYVLGILKAYSTRVGAGPFPTELFDETGEFLCKQGNEFGATTGRRRRTGWLDTVAVRRAVQLNSLSGFCLTKLDVLDGLKEVKLCVAYRMPDGREVTTTPLAADDWKGVEPIYETMPGWSESTFGVKDRSGLPQAALNYIKRIEELTGVPIDIISTGPDRTETMILRDPFDA

SEQ ID NO: 89 - DNA, 11756 bp, Escherichia coli; identical to SEQ ID NO: 54
  CDS (3951)..(4853)

SEQ ID NO: 90 - protein, 300 aa, Escherichia coli
VKIAILSRDGTLYSCKRLREAAIQRGHLVEILDPLSCYMNINPAASSIHYKGRKLPHFDAVIPRIGTAITFYGTAALRQFEMLGSYPLNESVAIARARDKLRSMQLLARQGIDLPVTGIAHSPDDTSDLIDMVGGAPLVVKLVEGTQGIGVVLAETRQAAESVIDAFRGLNAHILVQEYIKEAQGCDIRCLVVGDEVVAAIERRAKEGDFRSNLHRGGAASVASITPQEREIAIKAARTMALDVAGVDILRANRGPLVMEVNASPGLEGIEKTTGIDIAGKMIRWIERHATTEYCLKTGG

SEQ ID NO: 91 - DNA, 10404 bp, Escherichia coli
  CDS (3788)..(4351)
accagctccagcgtgtcttaaccgccgggctggtaactgaaaagtgggaataagataagttttcttgactgggaaggtaaaataccgtatgcgttcagtcggcaaaatttcgccaaatctcctggatatcttccatcagatagccacgatagagcagaaaacgctggatcttaactttttctgaaaagacagttggcaaaggttcgccatattttcgcgtcgcctgatcgcgcgccagtgcgcaccagtcgatgtcacattcacgcatcgctttttctgtcgcttcgcgggaaatacctttctgattcagttcctggcgaatacgcgcaggtccataacctttgcggctacggctggcgataaagcgcgcaacaaatcggctgtcatcgagatagccatgttcatggcaccaggcaataacgcgctcgtaatcttctgccgtagcatcaatctcttctgggccatttttgcccataatcggtgccgcgagtttacgtcgcagttcttgctcactgtgatcgcgcaccgccagaatgcgtaccgcacgatccaacaggcgagcatatgccgggcgacgggatgttgattctgtcatggcatatccttacaacttaaaaaagcaaaagggccgcagatgcgacccttgtgtatcaaacaagacgattaaaaatcttcgttagtttctgctacgccttcgctatcatctacagagaaatccggcgttgagttcgggttgctcagcagcaactcacgtactttcttctcgatctctttcgcggtttccgggttatctttcagccaggcagtcgcattcgctttaccctgaccgatcttctcacctttgtagctgtaccacgcgcctgctttctcgatcagcttctcttttacgcccaggtcaaccagttcgccgtagaagttgataccttcgccgtagaggatctggaattcagcctgtttaaacggcgcagcgattttgttcttcaccactttcacgcgggtttcgctacccaccacgttttcgccctctttcaccgcgccgatacgacggatgtcgagacgaacagaggcgtagaatttcagcgcgttaccaccggtagtggtttccgggttaccgaacatcacaccaattttcatacggatctggttgatgaagatcagcagcgtgttggactgcttcaggttacccgccagcttacgcatcgcctggctcatcatacgtgccgcaaggcccatgtgagagtcgccgatttcgccttcgatttccgctttcggcgtcagtgccgccacggagtcaacgacgataacgtctactgcgccagaacgcgccagggcgtcacagatttccagtgcctgctcgccggtgtccggctgggagcacagcaggttgtcgatatcgacgcccagtttacgtgcgtagattgggtccagcgcgtgttcagcatcgataaacgcacaggttttaccttcacgctgcgctgcggcgatcacctgcagcgtcagcgtggttttaccggaagattccggtccgtagatttcgacgatacggcccatcggcagaccacctgccccaagcgcgatatccagtgaaagcgaaccggtagagatggtttccacatccatggaacggtcttcacccaggcgcatgatggagcctttaccaaattgtttctcaatctggcccagtgctgccgccaacgctttctgtttgttttcgtcgatagccatttttactcctgtcatgccgggtaataccggatagtcaatatgttctgttgaagcaattatactgtatgctcatacagtatcaagtgttttgtagaaattgttgccacaaggtctgcaatgcatacgcagtagcctgacgacgcaccgcatcacggtcgccgctgaagcattcccgccgggtaatgccttcaccgcgggcagtggcaaaagcaaaccagacggtgccgacaggcttctcttcactgccgccatccggcccggcgataccactaatagacacggcataatcagcacgagccgctttcagtgcgcctatcgccatttccaccacgacgggttcactcaccgcgccatgctgcgccagcgtctcttcgcgtacgccgatcatctgcgctttggcttcgttactgtaggtgacaaatccgcgttcaaaccaggcggagctaccggcaatatcggtaatcactttcgctacccaaccaccggtacaagactcggcagttgttacggttgcgccacgggctttcagcgcctgcccaacctgttcacttaactgcatcagttcactgtcagtcatcacaacctctgtcagtcaaaaatttatgccggacaagatagcactttcgtcaggaagatggtgttggcgttgcaattttacgaggaggattcagaaaaaagctgattagccagagggaagctcacgcccccctcttgtaaatagctactgtactcgcgccagcgccacggcttgtcctaactgccagaccgccattgcgtaatgggtgctgtggttgtaacgggtgatggtgtagaagttcggcagaccgtaccagtactggtagccggtgccaacatccagacgcagcaggctggcttgttgatggttgcccagcggctgctgtggcgttaaacctgcggcggcaagctgcgaaatgctgtacttagttttgaagccatttggcaagcctggagcctgaccgtttgccattaccgcgacctgatcgcctttcacccagccgtgcgctttgaaatagttcgccacgctaccgatcgcatcaaccggatcccacaggttgatatgcccgtcgccgctgaaatctaccgcatattgtttgtaagacgacggcataaactgtccgtagcccatcgccccggcaaaggaacctttcagattgagcggatcgtcctgctcgtcgcgcgccatcaacaggaaggtttccagctcgccagagaaatactccgcgcggcgtgggtagttaaatgacagcgttgccagcgcatcgaggatgcgagttttccccatcacgcgcccccagcgggtttcaacgccgataatcccgacgataatttccggcggtactccatacacctgccacgcgcgattcaacgcatcttcatactgattccagaaaaccacaccgttctgcacgttgtccggcgtaataaattttttgcgataacggagccatgcgccgttcggacctgatggcggtttcaccgatgtggttggtgcctggttatccatcagccgcagtaccgaatccagacgcttcgcctgggagagaatttcctgcaactgctgacgatcgaaaccgtgtttgttcaccattttgtcgatgaactgctgggcattcgggttattagcgaaatcgccgcccatctgcatcacattgtgctgcggctcaagcaggaagccgccagacggcgttccggtggtcgtatcagtctcagtaggttttggcttgctgctacaggcggcaagcaacacaaaaaggggaagcaatgttacataacgacgcttgaacatgaggggtccatttaacagattcaaccaggggcaagtatggtaaagcatcacgccccgcacaaggaagcggtagtcactgcccgatacggactttacataactcaactcattcccctcgctatccttttattcaaactttcaaattaaaatatttatctttcattttgcgatcaaaataacacttttaaatctttcaatctgattagattaggttgccgtttggtaataaaacaataaatcctgaaggagagaacaatgatagaaaccattactcatggtgcagagtggtttatcgggctgttccaaaagggcggaaaggtgtttaccgggatggtgaccggcattcttccgctgttgattagcctgctggttatcatgaacgcactgattaattttatcggtcagcatcgtattgaacgttttgctcaacgttgcgccggtaaccctgtttcccgttacctactgttaccgtgcattggcacgtttgtcttttgcaatccgatgaccctaagcctgggtcgctttatgccggaaaagtacaaacccagctactacgcggcggcctcttatagctgccactcaatgaatggcctcttcccccatatcaaccctggcgaactgtttgtttatcttggcattgccagcggtctgacaacgctgaacctgccacttggcccactggcggtgagttatctgctggttggtctggtcaccaatttcttccgcggctgggtgaccgatctgaccaccgccatttttgagaaaaagatgggcattcaacttgaacaaaaagttcacctggcaggagcaacatcatgacgcatattcggatcgaaaaaggaacgggtggctggggcggcccgcttgagctgaaagccacgccgggaaaaaaaatcgtctatatcaccgccggtacccggcctgcgattgttgacaaactggcacagcttactggctggcaggctattgacggatttaaagaaggtgaacccgcggaggcggaaattggtgtcgcggtaatcgactgtggcggcacattacgctgcggcatctatccgaaacgacgtattcccaccattaatatccactcgacgggcaagtccggtccgctggcgcagtacattgtggaagatatttatgtctctggcgtaaaagaagaaaacatcactgtagtaggtgatgcgacaccacaacccttttccgtgggccgtgactatgacaccagtaagaaaatcaccgaacaaagcgatggtttactggcgaaggtgggaatgggcatggggtccaccgttgcggtgctgtttcaatctggtcgtgacaccatcgacactgtattaaaaaccattctgccgtttatggcattcgtctcggcgctcattggcatcattatggcttctggccttggtgactggattgcccacggtcttgctccgctggcgagccatccactgggtctggtcatgctggcgctcatctgttccttcccactgctttcacctttcttcggcccaggcgcagttatcgcacaggttatcggcgtattgattggcgtgcagattggtctcggcaatattccgccgcatctggctttaccggcactgtttgccatcaacgcgcaggcggcctgcgacttcatcccggtcggtttgtcgctggcggaagcccgtcaggacacggttcgcgtcggtgtcccttctgtactggtgagccgctttttaaccggcgcgccgactgtactgatcgcctggtttgtctccggttttatctatcaatagaggctgaaacatgaccgttatttatcagaccaccatcacccgtatcggcgcgagtgccattgacgccctcagtgaccagatgctcatcacctttcgtgaaggcgcgcctgcggacctcgaagagtattgcttcattcattgccacggcgagttgaaaggtgcactccatcccggtttgcaattttcactcgggcagcatcgctatccggtgaccgctgttggcagcgtggcggaagacaaccttcgcgaactgggtcatgtcaccctgcgcttcgatggtttaaacgaagcggaatttccgggcactgtccatgtggcaggccctgtccccgacgatatcgcgccgggatcggttttgaagtttgaatctgttaaggagtaaaaaatgaatcaggttgccgttgtcatcggtggtgggcaaaccttaggcgcgttcctgtgccacggtctggctgccgaggggtatcgcgtcgcggttgtcgatattcagagcgacaaagccgcaaatgtggcacaagaaattaacgccgaatatggtgaaagtatggcgtacggttttggtgctgacgccactagcgagcaaagcgttctggcgctctctcgtggggtagatgaaatctttggtcgcgtggatttgctggtctacagcgccggaatagcaaaagcagcctttatcagcgacttccagctcggcgattttgaccgttcgctacaggtgaatctggtgggttatttcctgtgtgcgcgtgaattttcgcgtttgatgatccgcgacgggattcaggggcgcattattcagatcaactcgaaatccggcaaagtgggcagcaaacacaactctggctacagcgcagcgaaatttggtggcgtcgggctgactcaatcactggcgctggatctggcggagtacggcattacggtgcattcactgatgctcggtaacctgctgaaatcgccgatgttccagtcactgttgccacaatacgcgaccaagctgggtatcaaaccggatcaagtcgagcagtattacatcgacaaagtaccgctcaaacgcggctgcgattatcaagatgtgctgaatatgctgctgttctacgccagtcctaaggcgtcgtactgcaccggacagtcgatcaatgtcaccggcggtcaggtgatgttctgatcaacagcggagatccattaaggatctccgtgagactatagaatgcctgatgcgctacgctcatcaggcatacaggacttccgccactacattaaggaaaagttatggtatccgcactcatcaccgtcgccgttatcgcctggtgtgcgcaactggccttaggcggctggcaaatttctcgttttaaccgtgccttcgacacactatgccagcaagggcgggttggcgtgggccgttccagcgggcgctttaaaccgcgggtcgtggtcgccatcgcgctggacgatcagcagcgcatcgtcgacaccttgtttatgaaaggactgaccgtcttcgcccgaccgcaaaaaattcccgcaattaccggtatgcatgcgggtgatttacagcccgatgtgatctttccccatgatccactatcacagaatgctctatcattggcgcttaaactgaaacgtggataatttcgttgtgaatgttacttgcttgcgaagttatcattttgaaacctaaatcaggtaatcacgcccatgaaacctcgtcagcgtcaggccgccattctggagtatctgcaaaagcagggtaaatgctcggttgaagaattggcgcaatactttgacaccacaggcacaaccattcgcaaagatctggtcattctggaacatgccggaaccgtcattcgtacttatggcggagtggtgttgaataaagaggaatccgatccgcctatcgatcataaaacactcatcaacacccacaagaaagagctgattgcagaagctgccgttagttttatccatgatggcgattcgatcattcttgatgctggcagtaccgttttgcagatggttcccctgctctcgcgctttaataacatcacggtgatgaccaacagcctgcatatcgtcaatgcgctatccgaactggataacgaacaaactatcctgatgccaggcggaacgtttcgcaaaaaatcggcctcatttcacgggcaactggcagagaatgccttcgagcatttcaccttcgataaattgtttatgggcaccgacggcatcgatctcaatgcgggcgtaaccacctttaacgaggtttataccgtcagtaaggcaatgtgcaatgccgcgcgcgaagtgattttgatggcggactcatcaaagtttggccgtaaaagccccaacgtagtttgcagtcttgaaagcgtcgataagctgattaccgacgcaggtatcgatccggcgtttcgtcaggcgctggaagagaaagggatcgatgtgatcataaccggagagagcaatgagtgaagcactactgaacgcgggacgtcagacgttaatgctggagttgcaggaagcaagccgtttaccggaacgtctgggcgatgattttgttcgcgccgccaatatcatcctgcactgtgaaggcaaagtggtggtttcgggaattggcaaatcgggccacattggtaagaaaatcgccgcaacgcttgccagtaccggcactccggctttttttgtccatccggcagaagcgctgcacggcgatctggggatgatcgaaagccgcgatgtgatgctgtttatctcttactccggtggcgcgaaggaactggatctgattattccgcgtctggaagataaatctatcgcgctgctggcgatgaccggcaaaccgacgtcaccgctgggcctggcggcaaaagcggtgctggatatctccgtagaacgcgaagcctgcccgatgcaccttgcgccgacctccagcaccgtcaataccctgatgatgggtgacgcgctggcgatggcggtcatgcaggcgcgcggatttaatgaagaagattttgcccgctcccacccagccggggcactgggcgctcgcttgctgaataaagtgcatcatctgatgcgccgtgacgatgccatcccacaggtggcgttaaccgccagcgtgatggatgcgatgctggaactcagccgcaccggtctggggctggtggcggtatgtgacgctcaacaacaggtacaaggcgtctttaccgacggcgatttacgtcgctggctggttggcggcggcgcactcaccacgccagtcaatgaagcgatgacggtcggcggcaccacgttgcaatcgcaaagtcgcgccatcgacgccaaagagatcctgatgaagcgcaaaatcactgccgcaccggtggtggatgaaaacggcaaactcaccggcgcaataaacctgcaggatttctatcaggccgggattatttaatccttcaatcccagacgtttcgccagccgatgcaggttggcgacgtcggtttccagcatccgcgcgcaggcagcccagttgtgatgattttgtgccagtgcctgacgaatagtttcacgctggaacgcttctgtcgcttcacgcaggttttgcttaacaacgggcaccgccgccacttctggcgtcggcaacgtcacctcaggaaaagcaaaatgttgcgcctcaagaatcacttcatcgccgctgcgggtggctctcgccagaactaccgcccgatgaatagcatgttccagttcgcgcacgtttcccggaaaactgtagtgttgcagtaaatttcgcgctccggcacttaataccacgcgggagagcccctgccgcaaacgacactgctcgcagaaataccccgccagcagaatgacatcatcgccccgctcacgcagcggcggcaccgaaagtggaaacacgctcaggcgatgaaacaaatcggcgcggaatcgccctgccagcacctcttcgcgtaaatcgcggttagtcgccgccagcacgcgcacatcgacccgcaaacaacggtcatcgccaacgcgctgaatatcgccatactgcaacaccctcagcagcttggcctgcaatgccaacgacaactcgccgatctcatccagaaacagcgtgccgttatccgccatttcaaacttcccgctgcgattactgatagcgccagtaaacgctcctttcacatgcccgaacaactcactttccgccacactttccggcagtgcagcacagttgagatagaccagcggattcaccgcccgtggcgaggcttcatgaatcgctttcgccaccagctccttaccggttccagtctcaccgctgatcaggacgttgagatcggacgccgccacaatctcaatctcttttttcagttgcgtcatgccaggggacaagccaatcatctgcgtctgtttcaccgcttcaaacggcgtggcatcgcctggcagcatattctggctttccagttgttcaatcagcaacgcattgcttaacgctcccgccgccagcgcagcaatcagccgtagctcttcgtcgctgaaaacatcgaactgatcgggctgcatcccgtcgagcgtcagtgcgccgatcaggttttgcccggcaaacaatggcagaccaacgcaggcgtgaaccttcagactctcctgcccaggaatcaaaccgtcatagggatcgggcaattcgctgtctgcgggaaagcgcaccacatccccggcgcgggcaatcgcttccagccgtggatgcccttccagcgcaaagcgtctaccgagtacatcctttgccagaccgtcgatggcaagcggaataaactgccgcgaatcgtaacgtagcaacgcagacgcatcgcactccagcacctgacgtagcgtggtgatcaggcgctgaaaacgatcctggtgaccaatcccacgctgcaattcgatggcgatattcgccagcacatcaacggaaaaactcatctttgcctcactgtcaatttgactatagatattgtcatatcgaccatttgattgatagtcattttgactactcattaatgggcataattttatttatagagtaaaaacaatcagataaaaaactggcacgcaatctgcaattagcaagacatcttttta

SEQ ID NO: 92 - protein, 187 aa, Escherichia coli
MIETITHGAEWFIGLFQKGGKVFTGMVTGILPLLISLLVIMNALINFIGQHRIERFAQRCAGNPVSRYLLLPCIGTFVFCNPMTLSLGRFMPEKYKPSYYAAASYSCHSMNGLFPHINPGELFVYLGIASGLTTLNLPLGPLAVSYLLVGLVTNFFRGWVTDLTTAIFEKKMGIQLEQKVHLAGATS

SEQ ID NO: 93 - DNA, 10390 bp, Escherichia coli; identical to SEQ ID NO: 42
  CDS (152)..(226)

SEQ ID NO: 94 - protein, 24 aa, Escherichia coli [sequence omitted]

SEQ ID NO: 95 - DNA, 10480 bp, Escherichia coli
  CDS (6265)..(7455)
ttgatcaactcctgatgattaatgagcagttttatgagaaaagtgtggcgcggatcatggtttaatcgaggaaaaacgccttttcctggatcataaagtggtagaacacattgcattcaaatcgcgcgtaatgaataaagatgtcagacaacttcctcaccgtaacgcatagtgctggtacggttgcgcccatctttcttcgagcgatacagacacgtatcggcttcgaccatcaatttattaaagtcatcggtcagcgttaggtacgatgcgcgaccactaccgacgccaatacttaccgtgagataaagcgttttttgttgccaggtgaatggttgcagttcaacgcctttacggattttttccgccattagcagaccatcgacaggattcaccgacggcactgcaacagcaaattcttcgccgcccattcgcgccaccagccccttatcaccgacaatcttctgaatatgccgggcaaacacgcttaacactttatcgccacattcatgtccatagttatcgttaatgcttttgaaatagtcgatatcaagcagcatgacagtcagatgttgtgtctgtttcagcgatggacttttcagcgcctcataaagaccggaccgtgagtaaacctgagtcagaaaatcaaagtcggctcgcagcgcaacttgcttcattagcgaattgatcgctgccacgctaaaagaaaccataattgggcatatcgccatcgtggcaataccgagacgtgcggagaacatttgcggaatggagaacggcgaaccgaccgagatatcaatcaccgaatttgccaccagtacgatttccaccgcaccggtgacaaaggtcaacagacatgttacctgcggcgtatagcgcactgcacaccagattaatgcaggcagcgggaacgccagactccccgctccgccaatgactaccgaggcaataaccgacacaataagcgcgatggcgggcatcatctgttctgctttaaagcgcggcagcactccaggaatagccaacgtcagcatacaaggcacgatcaacacgcccgttgagaattgctcactgaaccagtccgcaagcaaaggccagaaatccagactatcaatactgaccgaaccaagatagcatgttcgctgacagcggcggcaaataaaggtaccctgggaatgctattttgtcgttttccgcaattctcatggctgattcatctgtacaaccagccagtgatagattaccgccacgatataacgttgttgttcttcgcttaacgaaacaccctgcggaatgttatgccacttagccagacaaccgcgacagcaggtcgcggtggcgtgctgagcgataaacaccggatgcccgcgcatgggggtttgcttaccgtcattagccggtaatgccggagcaagacgtttagcgacaaaatccgccgcatgttgttcgatgactggcgcgcctttctccaggcaatactgacgctctttcatgcccagacgaaagcgagagcgaaattttgaacgggataaacgcgcgaagagtggatcgagagactgcattaataaaccgaacgccctaactgtttcgtcaattgttcaagaacggcaatacccgcaagcgagttacctgcatcatccagttccggactccagacagcgatggccatttcatgcggaacaatcgccacaataccgccaccaacgccagatttcgccggtagccccacccgccaggcaaactcccccgcgttctggtacataccactggtcgccatcagcgcgttaatttgccgcgcctgcattggcgtcaccactggttcatcaatatgaatagctttcccctgattagccagaaagacaaacgtccgggccagctctacacagctcattttcagagcgcagtaatgaaagtagttttgcagaacggttgtcacgtcatgatggaaattgccaaacgacttcatcagccaggcgatagccgcatttcgcgcggaatgttcaaattcggaacgcgctaccaccgtatcgtaggaaatatcagacacaccgcttaagccgcgcacgacttccagcatacgttgccgtggtgcgcttaatcgcccttgcaacatatcgcagaccaccagcgcaccggcattaatgaacggattacgcggtataccctgctccatttccagttgcactaaggaattgaacggtgatccagacggatctttgccgacgcgttgccagatttcctcttcggagtaatgacgcatggcgacaacgagactcagcactttggaaatagactgaatggaaaaacgttcttgcgcgtctccggcctgaaaaagctgtccgtcaacggtacagatagcaatccccaatcgggaaccgtctactgtagccagcgccggaatataatccgcgactttaccctgaccaatgagcggccgcacttgccgcaagatgttttctaaaattgcattatccatggcgactgccactttctactcctggaccgcaggtctgaaaagacctgcgagtatatcagagctgaatatgtcgcgtcagatccggtctttccacaccgtctggatattacagaattcgtgtaagccgaaatgggaaagctcacgaccaaagccactctttttcacgccaccaaaggccactcgcgcgtcgctggcacaataaccattgataaacaccccaccgcattccagacgtgccgccatctgtctggcctgtgtttcgtcagtggtaaaaatggtcgctgaaaggccgaactcactatcattagccagttccagtgcatgttctgcatctttcgcaatggtgattgccgcaacggggccaaacatttcttcccgaaacgcggtcatttctggggtaacattcgccagaaccgttggcggatagtagttacctgccccagccatcttttccccgcccagtaacaaacgcgcaccctgcgccagggttttctccacctgatgatgcagctcatcacgtaaatcaaaacgagccattggtccgagagcgttctcttcgtcacggggatcgcccattttcaaggctgccgcagctgccacaaaacgttcggtaaatgccgaagcaattccctcttcgataataaagcgttttgccgctgcacatacctgtccggtattctgataacgtccggctaccgccgctttcaccgccagttccagatcggcatcgttaagcacaataaacggatccgaaccgcccagttccagtacgcattttttcagtgccgctccagcctgtgcgccaatagccgctcccgcacgaacacttccggtcaccgtgacagcagcaatgcgcgagtctttaatcatctgactgacaccgtcgttgtcggcattcagccagccatatacgccttgtgggatacccgcatctttaaacacctgggcaatgagctgtgcacagcccatcacattcggcgcatgtttaagtaagtagccgttacctgcaagaatgatgggaacagcgccacgcatcacctgccataacggaaaattccacggcataatcgccagaatcgtccccaacggtcgatactcaataaccgcctgctgattttccaccagcgtaggttccgccttcagcattgccggaccatgttctgcataccagtcacacaaattcgccgatttcgccacttcagcgcgcgcctggttgattggtttgcccatttcgcgggtgatcatttgcgccatttcttcgctacgagcgcgcagagccttaccgatatcacgcagtttttcagcacgataatctatatttgtctcgcgccagtcgcgaaagcctgctgccgccagctgaagtgcgttttcgatatcgtcagcgccagcccacggcagcacagaaagttgttcacccgtggcaggatttatcgaaattgcatgagttgccggagtaatggtcatcggggtatctcctttatgagtcatggtatgaagatacgcagatttactcttgctttaaaatgaataatattaagccacttattcacgaatcgagaatgctatggatctgacccaactggagatgttcaacgcggttgccgaagctggcagcataacccaggctgcagcaaaagtgcatcgcgtgccgtcgaatctcactacccgtctgcgccagctggaaacagaactgggggttgatctgtttattcgcgagaatcagcgtttacgtctctctcctgccgggcataactttttacgctatagccaacaaattctcgcgttagtggatgaagcgcggagcgttgtcgctggcgatgagccgcaaggtttattttctcttggttcgctggaaagcaccgctgcagtgcgcattccagccacgctggcggaattcaaccgtcgttatcccaaaattcagttttcactttccaccggcccttccggcactatgctggatggtgtactggagggaaaactgaatgcggcgtttattgatggacccattaaccatactgccatcgacgggataccggtataccgcgaggaactgatgatcgtcacgccacaaggatatgcgccagtaacccgtgccagtcaggttaatggcagtaacatttatgccttccgcgccaattgttcgtatcgtcgccacttcgagagctggtttcatgctgacggtgccgctccgggaactatccatgagatggagtcttatcacggaatgttggcctgtgtgatcgcaggagcaggcattgcgcttattccgcgctctatgctggaaagtatgccggggcatcaccaggttgaagcgtggccgttagctgagcaatggcgttggttaacaacctggctggtctggcgtcgtggtgcgaaaacacgtccgctcgaggcatttattcaactgctggatgtgcctgactcggcaagacagggatatcaatgagctatttttgatagttcttgcggttaatatgctctatatagtgatgttccgatgacttatgactatatggggcaaatatggttacgccagtaagcatcagcaattacatatctcttcctgatgattttcccgtacgtaatattgcaccgcaggtaaaagaagttttaaaggattttattgatgcacttagtacaataatatgtaatgaagagtggcgcacgtctttaaacatcaactcagccacaaaaaagatatttaataaccttgacaacttatcatatattcagaggacttcttttcggggtaacgacacgctatacaatgaaaaggttcagtttaaactcacttatcccgccaggaatggaagacacaaagaaaatattgaatttcaggtagtaataaatttaagccctatttatttagataattttcgccatgatggagaaattaatattttttgcgctcccaacccaaagcctgtcactatggggcgcgtatttcagaccggcgtcgagcgtgtactctttctgtttctgaatgattttattgaacaatttccaatgatcaaccctggtgttcccatcaaaagagcgcatacaccacatattgaacccctgccttcggatcaccataccgctgcagattacttacgccagtttgatttgcttgtcctgaattttatctctcgcggtaattttgtcatactcccccgattatggaataactctgaggttcacagatggttcgtcaataaagatcctaacttgatcaccgccattctcgacataacggacagcgaattaaaagaggatttgttgcaaagcctgatggattcattaggttctaacaaacatgtactacccgaagtctgcatctgctttttatcccttttagcagaacaagaatctcctcattttcagaacttgtttttatttttcgccaatatgttattgcactatcaccaatttatgaatcccaatgaaagtgatttgaatgacgtgttgatgccagcatcattaagtgatgataaaattatcaaacatatggcgcgcaggaccctcaaactgtttgtaaaaaatgaaacaccgccaaaagttactcacgaagacctggtgaaaaacaggcctcgctcccctgtcagaccacctatacccgcaaccgccaaaacgccagacctccctgaacgtcattaaaccgtgatgttaccgactctctgacgcgtgaaagaatcagcgtcagagaaacggaaaacgcgatccagatcacaaatgcattgtattcacatcattaaccgttttaagatcatttcatcactttttcgcaactcacccgataatctgttatgacaacaaacactgtttcccgcaaagtggcgtggctacgggtcgttacgctggcagtcgccgccttcatcttcaacaccaccgaatttgtccctgttggcctgctctctgacattgcgcaaagttttcacatgcaaaccgctcaggtcggcatcatgttgaccatttacgcatgggtagtagcgctaatgtcattgccttttatgttaatgaccagtcaggttgaacggcgcaaattactgatctgcctgtttgtggtgtttattgccagccacgtactgtcgtttttgtcgtggagctttaccgttctggtgatcagtcgcattggtgtggcttttgcacatgcgattttctggtcgattacggcgtctctggcgatccgtatggctccggccgggaagcgagcacaggcattgagtttaattgccaccggtacagcactggcgatggtcttaggtttacctctcgggcgcattgtgggccagtatttcggttggcgaatgaccttcttcgcgattggtattggggcgcttatcacccttttgtgcctgattaagttacttcccttactgcccagtgagcattccggttcactgaaaagcctcccgctattgttccgccgcccggcattgatgagcatttatttgttaactgtggtggttgtcaccgcccattacacggcatacagctatatcgagccttttgtacaaaacattgcgggattcagcgccaactttgccacggcattactgttattactcggtggtgcgggcattattggcagcgtgattttcggtaaactgggtaatcagtatgcgtctgcgttggtgagtacggcgattgcgctgttgctggtgtgcctggcattgctgttacctgcggcgaacagtgaaatacacctcggggtgctgagtattttctgggggatcgcgatgatgatcatcgggcttggtatgcaggttaaagtgctggcgctggcaccagatgctaccgacgtcgcgatggcgctattctccggcatatttaatattggaatcggggcgggtgcgttggtaggtaatcaggtgagtttgcactggtcaatgtcgatgattggttatgtgggcgcggtgcctgcttttgccgcgttaatttggtcaatcattatatttcgccgctggccagtgacactcgaagaacagacgcaatagttgaaaggcccattcgggccttttttaatggtacgttttaatgatttccaggatgccgttaataataaactgcacacccatacataccagcaggaatcccatcagacgggagatcgcttcaatgccacccttgcccaccagccgcataattgcgccggagctgcgtaggcttccccacaaaataaccgccaccaggaaaaagatcagcggcggcgcaaccatcagtacccaatcagcgaaggttgaactctgacgcactgtggacgccgagctaataatcatcgctatggttcccggaccggcagtacttggcattgccagcggcacaaaggcaatattggcactgggttcatcttccagctcttccgacttgcttttcgcctccggtgaatcaatcgctttctgttgcggaaagagcatccgaaaaccgataaacgcgacgattaagccgcctgcaattcgcagaccgggaatcgaaatgccaaatgtatccatcaccagttgcccggcgtaatacgccaccatcatgatggcaaatacgtacaccgaggccatcaacgactgacgattacgttcggcactgttcatgttgcctgccaggccaagaaataacgcgacagttgttaatgggttagctaacggcagcaacaccaccagccccaggccaattgctttaaacaaatctaacattggtggttgttatcctgtgtatctgggttatcagcgaaaagtataaggggtaaacaaggataaagtgtcactctttagctagccttgcatcgcattgaacaaaacttgaaccgatttagcaaaacgtggcatcggtcaattcattcatttgacttatacttgcctgggcaatattatcccctgcaactaattacttgccagggcaactaatgtgaaaagtaccagcgatctgttcaatgaaattattccattgggtcgcttaatccatatggttaatcagaagaaagatcgcctgcttaacgagtatctgtctccgctggatattaccgcggcacagtttaaggtgctctgctctatccgctgcgcggcgtgtattactccggttgaactgaaaaaggtattgtcggtcgacctgggagcactgacccgtatgctggatcgcctggtctgtaaaggctgggtggaaaggttgccgaacccgaatgacaagcgcggcgtactggtaaaacttaccaccggcggcgcggcaatatgtgaacaatgccatcaattagttggccaggacctgcaccaagaattaacaaaaaacctgacggcggacgaagtggcaacacttgagtatttgcttaagaaagtcctgccgtaaacaaaaaagaggtatgacgatgtccagacgcaatactgacgctattaccattcatagcattttggactggatcgaggacaacctggaatcgccactgtcactggagaaagtgtcagagcgttcgggttactccaaatggcacctgcaacggatgtttaaaaaagaaaccggtcattcattaggccaatacatccgcagccgtaagatgacggaaatcgcgcaaaagctgaaggaaagtaacgagccgatactctatctggcagaacgatatggcttcgagtcgcaacaaactctgacccgaaccttcaaaaattactttgatgttccgccgcataaataccggatgaccaatatgcagggcgaatcgcgctttttacatccattaaatcattacaacagctagttgaaaacgtgacaacgtcactgaggcaatcatgaaaccactttcatccgcaatagcagctgcgcttattctcttttccgcgcagggcgttgcggaacaaaccacgcagccagttgttacttcttgtgccaatgtcgtggttgttcccccatcgcaggaacacccaccgtttgatttaaatcacatgggtactggcagtgataagtcggatgcgctcggcgtgccctattataatcaacacgctatgtagtttgttctggccccgacatctcggggcttattaacttcccacctttaccgctttacgccaccgcaagccaaatacattgatatacagcccggtcataatgagcaccgcacctaaaaattgcagacccgttaagcgttcatccaacaatagtgccgcacttgccagtcctactacgggcaccagtaacgataacggtgcaacccgccaggtttcatagcgtcccagtaacgtcccccagatcccataaccaacaattgtcgccacaaacgccagatacatcagagacaagatggtggtcatatcgatagtaaccagactgtgaatcatggttgcggaaccatcgagaatcagcgaggcaacaaagaagggaatgattgggattaaagcgctccagattaccagcgacatcaccgccggacgcgttgagtgcgacatgatctttttattgaagatgttgccacacgcccaactaaatgctgccgccagggtcaacataaagccgagcatcgccacatgctgaccgttcagactatcttcgattaacaccagtacgccaaaaatcgctaaggcgatccccgccaattgtttgccatgcagtcgctccccgaaagtaaacgcgccaagcatgatagtaaaaaacgcctgtgcctgtaacaccagcgaagccagtccagcaggcataccgaagttaatggcacaaaaaagaaaagcaaactgcgcaaaactgatggttaatccataccccagcagcaaattcagtggtactttcggtcgtgcgacaaaaaagatagccggaaaagcgaccagcataaagcgcaaaccggccagcatcagcggtggcatgttatgaagccccactttgatgaccacaaaatttagcccccatacgaccactaccagtagcgccaacaccccatcttttcgcgacattctaccgcctctgaatttcatcttttgtaagcaatcaacttagctgaatttacttttctttaacagttgattcgttagtcgccggttacgacggcattaatgcgca

SEQ ID NO: 96 - protein, 396 aa, Escherichia coli
MTTNTVSRKVAWLRVVTLAVAAFIFNTTEFVPVGLLSDIAQSFHMQTAQVGIMLTIYAWVVALMSLPFMLMTSQVERRKLLICLFVVFIASHVLSFLSWSFTVLVISRIGVAFAHAIFWSITASLAIRMAPAGKRAQALSLIATGTALAMVLGLPLGRIVGQYFGWRMTFFAIGIGALITLLCLIKLLPLLPSEHSGSLKSLPLLFRRPALMSIYLLTVVVVTAHYTAYSYIEPFVQNIAGFSANFATALLLLLGGAGIIGSVIFGKLGNQYASALVSTAIALLLVCLALLLPAANSEIHLGVLSIFWGIAMMIIGLGMQVKVLALAPDATDVAMALFSGIFNIGIGAGALVGNQVSLHWSMSMIGYVGAVPAFAALIWSIIIFRRWPVTLEEQTQ

SEQ ID NO: 97 - DNA, 11756 bp, Escherichia coli; identical to SEQ ID NO: 54
  CDS (3168)..(3890)

SEQ ID NO: 98 - protein, 240 aa, Escherichia coli [sequence omitted]
